United States Patent Application Publication US 2026/0345767 A1, published November 5, 2026 (application 19/105,579).

The application's sequence listing, which the Patent Office published only in electronic form, follows.

SEQUENCE LISTING (588 sequences)

SEQ ID NO: 1 - protein, 175 aa, Helicobacter pylori
ESQVRQQFSKDIEKLLNEQVNKEMQSSNLYMSMSSWCYTHSLDGAGLFLFDHAAEEYEHAKKLIIFLNENNVPVQLTSISAPEHKFEGLTQIFQKAYEHEQHISESINNIVDHAIKSKDHATFNFLQWYVAEQHEEEVLFKDILDKIELIGNENHGLYLADQYVKGIAKSRKSGS

SEQ ID NO: 2 - protein, 165 aa, Helicobacter pylori
DIIKLLNEQVNKEMQSSNLYMSMSSWCYTHSLDGAGLFLFDHAAEEYEHAKKLIIFLNENNVPVQLTSISAPEHKFEGLTQIFQKAYEHEQHISESINNIVDHAIKSKDHATFNFLQWYVAEQHEEEVLFKDILDKIELIGNENHGLYLADQYVKGIAKSRKSGS

SEQ ID NO: 3 - protein, 167 aa, Helicobacter pylori
SKDIIKLLNEQVNKEMQSSNLYMSMSSWCYTHSLDGAGLFLFDHAAEEYEHAKKLIIFLNENNVPVQLTSISAPEHKFEGLTQIFQKAYEHEQHISESINNIVDHAIKSKDHATFNFLQWYVAEQHEEEVLFKDILDKIELIGNENHGLYLADQYVKGIAKSRKSGS

SEQ ID NO: 4 - protein, 154 aa, synthetic construct
MQIYEGKLTAEGLRFGIVASRFNHALVDRLVEGAIDAIVRHGGREEDITLVRVPGSWEIPVAAGELARKEDIDAVIAIGVLIRGATPHFDYIASEVSKGLADLSLELRKPITFGVITADTLEQAIERAGTKHGNKGWEAALSAIEMANLFKSLR

SEQ ID NO: 5 - protein, 4 aa, synthetic construct
GSGG

SEQ ID NO: 6 - protein, 6 aa, synthetic construct
GSGGSG

SEQ ID NO: 7 - protein, 42 aa, synthetic construct
GSGGEMKQIEDKIEEILSKIYHIENEIARIKKLIGRGSGGSG

SEQ ID NO: 8 - protein, 20 aa, synthetic construct
LDSIKEELDKIHKNGSGGSG

SEQ ID NO: 9 - protein, 20 aa, synthetic construct
IDSIKEEIDKIHKNGSGGSG

SEQ ID NO: 10 - protein, 37 aa, synthetic construct
MKQIEDKIEEILSKIYHIENEIARIKKLIGRGSGGSG

SEQ ID NO: 11 - protein, 6 aa, synthetic construct
GSGGGG

SEQ ID NO: 12 - skipped

SEQ ID NO: 13 - protein, 14 aa, synthetic construct
GSGGSGGSGGSGGG

SEQ ID NO: 14 - protein, 10 aa, synthetic construct
GGGSGGGSGG

SEQ ID NO: 15 - protein, 4 aa, synthetic construct
GGGG

SEQ ID NO: 16-17 - skipped (2 entries)

SEQ ID NO: 18 - protein, 1273 aa, Severe acute respiratory syndrome coronavirus 2
MFVFLVLLPLVSSQCVNLTTRTQLPPAYTNSFTRGVYYPDKVFRSSVLHSTQDLFLPFFSNVTWFHAIHVSGTNGTKRFDNPVLPFNDGVYFASTEKSNIIRGWIFGTTLDSKTQSLLIVNNATNVVIKVCEFQFCNDPFLGVYYHKNNKSWMESEFRVYSSANNCTFEYVSQPFLMDLEGKQGNFKNLREFVFKNIDGYFKIYSKHTPINLVRDLPQGFSALEPLVDLPIGINITRFQTLLALHRSYLTPGDSSSGWTAGAAAYYVGYLQPRTFLLKYNENGTITDAVDCALDPLSETKCTLKSFTVEKGIYQTSNFRVQPTESIVRFPNITNLCPFGEVFNATRFASVYAWNRKRISNCVADYSVLYNSASFSTFKCYGVSPTKLNDLCFTNVYADSFVIRGDEVRQIAPGQTGKIADYNYKLPDDFTGCVIAWNSNNLDSKVGGNYNYLYRLFRKSNLKPFERDISTEIYQAGSTPCNGVEGFNCYFPLQSYGFQPTNGVGYQPYRVVVLSFELLHAPATVCGPKKSTNLVKNKCVNFNFNGLTGTGVLTESNKKFLPFQQFGRDIADTTDAVRDPQTLEILDITPCSFGGVSVITPGTNTSNQVAVLYQDVNCTEVPVAIHADQLTPTWRVYSTGSNVFQTRAGCLIGAEHVNNSYECDIPIGAGICASYQTQTNSPRRARSVASQSIIAYTMSLGAENSVAYSNNSIAIPTNFTISVTTEILPVSMTKTSVDCTMYICGDSTECSNLLLQYGSFCTQLNRALTGIAVEQDKNTQEVFAQVKQIYKTPPIKDFGGFNFSQILPDPSKPSKRSFIEDLLFNKVTLADAGFIKQYGDCLGDIAARDLICAQKFNGLTVLPPLLTDEMIAQYTSALLAGTITSGWTFGAGAALQIPFAMQMAYRFNGIGVTQNVLYENQKLIANQFNSAIGKIQDSLSSTASALGKLQDVVNQNAQALNTLVKQLSSNFGAISSVLNDILSRLDKVEAEVQIDRLITGRLQSLQTYVTQQLIRAAEIRASANLAATKMSECVLGQSKRVDFCGKGYHLMSFPQSAPHGVVFLHVTYVPAQEKNFTTAPAICHDGKAHFPREGVFVSNGTHWFVTQRNFYEPQIITTDNTFVSGNCDVVIGIVNNTVYDPLQPELDSFKEELDKYFKNHTSPDVDLGDISGINASVVNIQKEIDRLNEVAKNLNESLIDLQELGKYEQYIKWPWYIWLGFIAGLIAIVMVTIMLCCMTSCCSCLKGCCSCGSCCKFDEDDSEPVLKGVKLHYT

SEQ ID NO: 19 - protein, 197 aa, Severe acute respiratory syndrome coronavirus 2
NITNLCPFGEVFNATRFASVYAWNRKRISNCVADYSVLYNSASFSTFKCYGVSPTKLNDLCFTNVYADSFVIRGDEVRQIAPGQTGKIADYNYKLPDDFTGCVIAWNSNNLDSKVGGNYNYLYRLFRKSNLKPFERDISTEIYQAGSTPCNGVEGFNCYFPLQSYGFQPTNGVGYQPYRVVVLSFELLHAPATVCGP

SEQ ID NO: 20 - protein, 290 aa, Severe acute respiratory syndrome coronavirus 2
QCVNLTTRTQLPPAYTNSFTRGVYYPDKVFRSSVLHSTQDLFLPFFSNVTWFHAIHVSGTNGTKRFDNPVLPFNDGVYFASTEKSNIIRGWIFGTTLDSKTQSLLIVNNATNVVIKVCEFQFCNDPFLGVYYHKNNKSWMESEFRVYSSANNCTFEYVSQPFLMDLEGKQGNFKNLREFVFKNIDGYFKIYSKHTPINLVRDLPQGFSALEPLVDLPIGINITRFQTLLALHRSYLTPGDSSSGWTAGAAAYYVGYLQPRTFLLKYNENGTITDAVDCALDPLSETKCTL

SEQ ID NO: 21 - protein, 663 aa, Severe acute respiratory syndrome coronavirus 2
VNLTTRTQLPPAYTNSFTRGVYYPDKVFRSSVLHSTQDLFLPFFSNVTWFHAIHVSGTNGTKRFDNPVLPFNDGVYFASTEKSNIIRGWIFGTTLDSKTQSLLIVNNATNVVIKVCEFQFCNDPFLGVYYHKNNKSWMESEFRVYSSANNCTFEYVSQPFLMDLEGKQGNFKNLREFVFKNIDGYFKIYSKHTPINLVRDLPQGFSALEPLVDLPIGINITRFQTLLALHRSYLTPGDSSSGWTAGAAAYYVGYLQPRTFLLKYNENGTITDAVDCALDPLSETKCTLKSFTVEKGIYQTSNFRVQPTESIVRFPNITNLCPFGEVFNATRFASVYAWNRKRISNCVADYSVLYNSASFSTFKCYGVSPTKLNDLCFTNVYADSFVIRGDEVRQIAPGQTGKIADYNYKLPDDFTGCVIAWNSNNLDSKVGGNYNYLYRLFRKSNLKPFERDISTEIYQAGSTPCNGVEGFNCYFPLQSYGFQPTNGVGYQPYRVVVLSFELLHAPATVCGPKKSTNLVKNKCVNFNFNGLTGTGVLTESNKKFLPFQQFGRDIADTTDAVRDPQTLEILDITPCSFGGVSVITPGTNTSNQVAVLYQDVNCTEVPVAIHADQLTPTWRVYSTGSNVFQTRAGCLIGAEHVNNSYECDIPIGAGICASYQTQT

SEQ ID NO: 22 - protein, 672 aa, Severe acute respiratory syndrome coronavirus 2
QCVNLTTRTQLPPAYTNSFTRGVYYPDKVFRSSVLHSTQDLFLPFFSNVTWFHAIHVSGTNGTKRFDNPVLPFNDGVYFASTEKSNIIRGWIFGTTLDSKTQSLLIVNNATNVVIKVCEFQFCNDPFLGVYYHKNNKSWMESEFRVYSSANNCTFEYVSQPFLMDLEGKQGNFKNLREFVFKNIDGYFKIYSKHTPINLVRDLPQGFSALEPLVDLPIGINITRFQTLLALHRSYLTPGDSSSGWTAGAAAYYVGYLQPRTFLLKYNENGTITDAVDCALDPLSETKCTLKSFTVEKGIYQTSNFRVQPTESIVRFPNITNLCPFGEVFNATRFASVYAWNRKRISNCVADYSVLYNSASFSTFKCYGVSPTKLNDLCFTNVYADSFVIRGDEVRQIAPGQTGKIADYNYKLPDDFTGCVIAWNSNNLDSKVGGNYNYLYRLFRKSNLKPFERDISTEIYQAGSTPCNGVEGFNCYFPLQSYGFQPTNGVGYQPYRVVVLSFELLHAPATVCGPKKSTNLVKNKCVNFNFNGLTGTGVLTESNKKFLPFQQFGRDIADTTDAVRDPQTLEILDITPCSFGGVSVITPGTNTSNQVAVLYQDVNCTEVPVAIHADQLTPTWRVYSTGSNVFQTRAGCLIGAEHVNNSYECDIPIGAGICASYQTQTNSPRRAR

SEQ ID NO: 23 - protein, 675 aa, Severe acute respiratory syndrome coronavirus 2
SSQCVNLTTRTQLPPAYTNSFTRGVYYPDKVFRSSVLHSTQDLFLPFFSNVTWFHAIHVSGTNGTKRFDNPVLPFNDGVYFASTEKSNIIRGWIFGTTLDSKTQSLLIVNNATNVVIKVCEFQFCNDPFLGVYYHKNNKSWMESEFRVYSSANNCTFEYVSQPFLMDLEGKQGNFKNLREFVFKNIDGYFKIYSKHTPINLVRDLPQGFSALEPLVDLPIGINITRFQTLLALHRSYLTPGDSSSGWTAGAAAYYVGYLQPRTFLLKYNENGTITDAVDCALDPLSETKCTLKSFTVEKGIYQTSNFRVQPTESIVRFPNITNLCPFGEVFNATRFASVYAWNRKRISNCVADYSVLYNSASFSTFKCYGVSPTKLNDLCFTNVYADSFVIRGDEVRQIAPGQTGKIADYNYKLPDDFTGCVIAWNSNNLDSKVGGNYNYLYRLFRKSNLKPFERDISTEIYQAGSTPCNGVEGFNCYFPLQSYGFQPTNGVGYQPYRVVVLSFELLHAPATVCGPKKSTNLVKNKCVNFNFNGLTGTGVLTESNKKFLPFQQFGRDIADTTDAVRDPQTLEILDITPCSFGGVSVITPGTNTSNQVAVLYQDVNCTEVPVAIHADQLTPTWRVYSTGSNVFQTRAGCLIGAEHVNNSYECDIPIGAGICASYQTGGSQSIIAYT

SEQ ID NO: 24 - protein, 1127 aa, Severe acute respiratory syndrome coronavirus 1
SDLDRCTTFDDVQAPNYTQHTSSMRGVYYPDEIFRSDTLYLTQDLFLPFYSNVTGFHTINHTFGNPVIPFKDGIYFAATEKSNVVRGWVFGSTMNNKSQSVIIINNSTNVVIRACNFELCDNPFFAVSKPMGTQTHTMIFDNAFNCTFEYISDAFSLDVSEKSGNFKHLREFVFKNKDGFLYVYKGYQPIDVVRDLPSGFNTLKPIFKLPLGINITNFRAILTAFSPAQDIWGTSAAAYFVGYLKPTTFMLKYDENGTITDAVDCSQNPLAELKCSVKSFEIDKGIYQTSNFRVVPSGDVVRFPNITNLCPFGEVFNATKFPSVYAWERKKISNCVADYSVLYNSTFFSTFKCYGVSATKLNDLCFSNVYADSFVVKGDDVRQIAPGQTGVIADYNYKLPDDFMGCVLAWNTRNIDATSTGNYNYKYRYLRHGKLRPFERDISNVPFSPDGKPCTPPALNCYWPLNDYGFYTTTGIGYQPYRVVVLSFELLNAPATVCGPKLSTDLIKNQCVNFNFNGLTGTGVLTPSSKRFQPFQQFGRDVSDFTDSVRDPKTSEILDISPCAFGGVSVITPGTNASSEVAVLYQDVNCTDVSTAIHADQLTPAWRIYSTGNNVFQTQAGCLIGAEHVDTSYECDIPIGAGICASYHTVSLLRSTSQKSIVAYTMSLGADSSIAYSNNTIAIPTNFSISITTEVMPVSMAKTSVDCNMYICGDSTECANLLLQYGSFCTQLNRALSGIAAEQDRNTREVFAQVKQMYKTPTLKYFGGFNFSQILPDPLKPTKRSFIEDLLFNKVTLADAGFMKQYGECLGDINARDLICAQKFNGLTVLPPLLTDDMIAAYTAALVSGTATAGWTFGAGAALQIPFAMQMAYRFNGIGVTQNVLYENQKQIANQFNKAISQIQESLTTTSTALGKLQDVVNQNAQALNTLVKQLSSNFGAISSVLNDILSRLDPPEAEVQIDRLITGRLQSLQTYVTQQLIRAAEIRASANLAATKMSECVLGQSKRVDFCGKGYHLMSFPQAAPHGVVFLHVTYVPSQERNFTTAPAICHEGKAYFPREGVFVFNGTSWFITQRNFFSPQIITTDNTFVSGNCDVVIGIINNTVYDPLQSELDSIKEELDKIHKN

SEQ ID NO: 25 - RNA, 11 nt, Cytomegalovirus sp.
  source 1..11: mol_type = genomic RNA
gggatcctacc

SEQ ID NO: 26 - RNA, 140 nt, synthetic construct
  source 1..140: mol_type = other RNA
ggacagatcgcctggagacgccatccacgctgttttgacctccatagaagacaccgggaccgatccagcctccgcggccgggaacggtgcattggaacgcggattccccgtgccaagagtgactcaccgtccttgacacg

SEQ ID NO: 27 - RNA, 100 nt, synthetic construct
  source 1..100: mol_type = other RNA
cgggtggcatccctgtgacccctccccagtgcctctcctggccctggaagttgccactccagtgcccaccagccttgtcctaataaaattaagttgcatc

SEQ ID NO: 28 - RNA, 110 nt, synthetic construct
  source 1..110: mol_type = other RNA
aaaaaaaaaaaaaaaaaaaaaaaaaaaaaagcatatgactaaaaaaaaaaaaaaaaaaaaaaaaaaaaaaaaaaaaaaaaaaaaaaaaaaaaaaaaaaaaaaaaaaaaaa

SEQ ID NO: 29 - protein, 408 aa, synthetic construct
HHHHHHHHGPLEVLFQGPEGVECDFSPLLSGTPPQVYNFKRLVFTNCNYNLTKLLSLFSVNDFTCSQISPAAIASNCYSSLILDYFSYPLSMKSDLSVSSAGPISQFNYKQSFSNPTCLILATVPHNLTTITKPLKYSRINKCSRLLSDDRTEVPQLVNANQYSPCVSIVPSTVWEDGDYYRKQLSPLEGGGWLVASGSTVAMTEQLQMGFGITVQNGTDTNSVCPKGSGGGGESQVRQQFSKDIEKLLNEQVNKEMQSSNLYMSMSSWCYTHSLDGAGLFLFDHAAEEYEHAKKLIIFLNENNVPVQLTSISAPEHKFEGLTQIFQKAYEHEQHISESINNIVDHAIKSKDHATFNFLQWYVAEQHEEEVLFKDILDKIELIGNENHGLYLADQYVKGIAKSRKSGS

SEQ ID NO: 30 - protein, 408 aa, synthetic construct
HHHHHHHHGPLEVLFQGPEGVECDFSPLLSGTPPQVYNFKRLVFTNCNYNLTKLLSLFSVNDFTCSQISPAAIASNCYSSLILDYFSYPLSMKSDLSVSSAGPISQFNYKQSFSNPTCLILATVPHNLTTITKPLKYSYINKCSRRLSDDRTEVPQLVNANQYSPCVSIVPSTVWEDGDYYRKQLSPLEGGGWLVASGSTVAMTEQLQMGFGITVQNGTDTNSVCPKGSGGGGESQVRQQFSKDIEKLLNEQVNKEMQSSNLYMSMSSWCYTHSLDGAGLFLFDHAAEEYEHAKKLIIFLNENNVPVQLTSISAPEHKFEGLTQIFQKAYEHEQHISESINNIVDHAIKSKDHATFNFLQWYVAEQHEEEVLFKDILDKIELIGNENHGLYLADQYVKGIAKSRKSGS

SEQ ID NO: 31 - protein, 408 aa, synthetic construct
HHHHHHHHGPLEVLFQGPEGVECDFSPLLSGTPPQVYNFKRLVFTNCNYNLTKLLSLFSVNDFTCSQISPAAIASNCYSSLILDYFSYPLSMKSDLSVSSAGPISQFNYKQSFSNPTCLILATVPHNLTTITKPLKYSYINKCSRLLSDDRTEVPQLVNANQYSPCVSIVPSTVWEDGDYYRKQLSPLEGGGWLRASGSTVAMTEQLQMGFGITVQNGTDTNSVCPKGSGGGGESQVRQQFSKDIEKLLNEQVNKEMQSSNLYMSMSSWCYTHSLDGAGLFLFDHAAEEYEHAKKLIIFLNENNVPVQLTSISAPEHKFEGLTQIFQKAYEHEQHISESINNIVDHAIKSKDHATFNFLQWYVAEQHEEEVLFKDILDKIELIGNENHGLYLADQYVKGIAKSRKSGS

SEQ ID NO: 32 - protein, 408 aa, synthetic construct
HHHHHHHHGPLEVLFQGPEGVECDFSPLLSGTPPQVYNFKRLVFTNCNYNLTKLLSLFSVNDFTCSQISPAAIASNCYSSLILDYFSYPLSMKSDLSVSSAGPISQFNYKQSFSNPTCLILATVPHNLTTITKPLKYSYINKCSRLLSDDRTEVPQLVNANQYSPCVSIVPSTVWEDGDYYRKQLSPLEGGGRLVASGSTVAMTEQLQMGFGITVQNGTDTNSVCPKGSGGGGESQVRQQFSKDIEKLLNEQVNKEMQSSNLYMSMSSWCYTHSLDGAGLFLFDHAAEEYEHAKKLIIFLNENNVPVQLTSISAPEHKFEGLTQIFQKAYEHEQHISESINNIVDHAIKSKDHATFNFLQWYVAEQHEEEVLFKDILDKIELIGNENHGLYLADQYVKGIAKSRKSGS

SEQ ID NO: 33 - protein, 408 aa, synthetic construct
HHHHHHHHGPLEVLFQGPEGVECDFSPLLSGTPPQVYNFKRLVFTNCNYNLTKLLSLFSVNDFTCSQISPAAIASNCYSSLILDYFSYPLSMKSDLSVSSAGPISQFNYKQSFSNPTCLILATVPHNLTTITKPLKYSYINKCSRLLSDDRTEVPQLVNANQKSPCVSIVPSTVWEDGDYYRKQLSPLEGGGWLVASGSTVAMTEQLQMGFGITVQNGTDTNSVCPKGSGGGGESQVRQQFSKDIEKLLNEQVNKEMQSSNLYMSMSSWCYTHSLDGAGLFLFDHAAEEYEHAKKLIIFLNENNVPVQLTSISAPEHKFEGLTQIFQKAYEHEQHISESINNIVDHAIKSKDHATFNFLQWYVAEQHEEEVLFKDILDKIELIGNENHGLYLADQYVKGIAKSRKSGS

SEQ ID NO: 34 - protein, 408 aa, synthetic construct
HHHHHHHHGPLEVLFQGPEGVECDFSPLLSGTPPQVYNFKRLVFTNCNYNLTKLLSLFSVNDFTCSQISPAAIASNCYSSLILDYFSYPLSMKSDLSVSSAGPISQFNYKQSFSNPTCLILATVPHNLTTITKPLKYSYINKCSRLLSDDRTEVPQLVNANQRSPCVSIVPSTVWEDGDYYRKQLSPLEGGGWLVASGSTVAMTEQLQMGFGITVQNGTDTNSVCPKGSGGGGESQVRQQFSKDIEKLLNEQVNKEMQSSNLYMSMSSWCYTHSLDGAGLFLFDHAAEEYEHAKKLIIFLNENNVPVQLTSISAPEHKFEGLTQIFQKAYEHEQHISESINNIVDHAIKSKDHATFNFLQWYVAEQHEEEVLFKDILDKIELIGNENHGLYLADQYVKGIAKSRKSGS

SEQ ID NO: 35 - protein, 408 aa, synthetic construct
HHHHHHHHGPLEVLFQGPEGVECDFSPLLSGTPPQVYNFKRLVFTNCNYNLTKLLSLFSVNDFTCSQISPAAIASNCYSSLILDYFSYPLSMKSDLSVSSAGPISQFNYKQSFSNPTCLILATVPHNLTTITKPLKYSYINKCSRLLSDDRTEVPQLVNANQYSPCVSIVPSTVAEDGDYYRKQLSPLEGGGWLVASGSTVAMTEQLQMGFGITVQNGTDTNSVCPKGSGGGGESQVRQQFSKDIEKLLNEQVNKEMQSSNLYMSMSSWCYTHSLDGAGLFLFDHAAEEYEHAKKLIIFLNENNVPVQLTSISAPEHKFEGLTQIFQKAYEHEQHISESINNIVDHAIKSKDHATFNFLQWYVAEQHEEEVLFKDILDKIELIGNENHGLYLADQYVKGIAKSRKSGS

SEQ ID NO: 36 - protein, 408 aa, synthetic construct
HHHHHHHHGPLEVLFQGPEGVECDFSPLLSGTPPQVYNFKRLVFTNCNYNLTKLLSNFSVNDFTCSQISPAAIASNCYSSLILDYFSYPLSMKSDLSVSSAGPISQFNYKQSFSNPTCLILATVPHNLTTITKPLKYSYINKCSRLLSDDRTEVPQLVNANQYSPCVSIVPSTVWEDGDYYRKQLSPLEGGGWLVASGSTVAMTEQLQMGFGITVQNGTDTNSVCPKGSGGGGESQVRQQFSKDIEKLLNEQVNKEMQSSNLYMSMSSWCYTHSLDGAGLFLFDHAAEEYEHAKKLIIFLNENNVPVQLTSISAPEHKFEGLTQIFQKAYEHEQHISESINNIVDHAIKSKDHATFNFLQWYVAEQHEEEVLFKDILDKIELIGNENHGLYLADQYVKGIAKSRKSGS

SEQ ID NO: 37 - protein, 408 aa, synthetic construct
HHHHHHHHGPLEVLFQGPEGVECDFSPLLSGTPPQVYNFKRLVFTNCNYNLTKLLSLFSVNDFTCSQISPAAIRSNCYSSLILDYFSYPLSMKSDLSVSSAGPISQFNYKQSFSNPTCLILATVPHNLTTITKPLKYSYINKCSRLLSDDRTEVPQLVNANQYSPCVSIVPSTVWEDGDYYRKQLSPLEGGGWLVASGSTVAMTEQLQMGFGITVQNGTDTNSVCPKGSGGGGESQVRQQFSKDIEKLLNEQVNKEMQSSNLYMSMSSWCYTHSLDGAGLFLFDHAAEEYEHAKKLIIFLNENNVPVQLTSISAPEHKFEGLTQIFQKAYEHEQHISESINNIVDHAIKSKDHATFNFLQWYVAEQHEEEVLFKDILDKIELIGNENHGLYLADQYVKGIAKSRKSGS

SEQ ID NO: 38 - protein, 408 aa, synthetic construct
HHHHHHHHGPLEVLFQGPEGVECDFSPLLSGTPPQVYNFKRLVFTNCNYNLTKLLSLFSVNDFTCSQISPAAINSTCYSSLILDYFSYPLSMKSDLSVSSAGPISQFNYKQSFSNPTCLILATVPHNLTTITKPLKYSYINKCSRLLSDDRTEVPQLVNANQYSPCVSIVPSTVWEDGDYYRKQLSPLEGGGWLVASGSTVAMTEQLQMGFGITVQNGTDTNSVCPKGSGGGGESQVRQQFSKDIEKLLNEQVNKEMQSSNLYMSMSSWCYTHSLDGAGLFLFDHAAEEYEHAKKLIIFLNENNVPVQLTSISAPEHKFEGLTQIFQKAYEHEQHISESINNIVDHAIKSKDHATFNFLQWYVAEQHEEEVLFKDILDKIELIGNENHGLYLADQYVKGIAKSRKSGS

SEQ ID NO: 39 - protein, 408 aa, synthetic construct
HHHHHHHHGPLEVLFQGPEGVECDFSPLLSGTPPQVYNFKRLVFTNCNYNLTKLLSLFSVNDFTCSQISPAAIASNCYSSLILDYFSYPLSMKSDLSVSSAGPISQFNYKQSFSNPTCLILATVPHNLTTITKPLKYSYINKCSRRLSDDRTEVPQLVNANQRSPCVSIVPSTVWEDGDYYRKQLSPLEGGGWLVASGSTVAMTEQLQMGFGITVQNGTDTNSVCPKGSGGGGESQVRQQFSKDIEKLLNEQVNKEMQSSNLYMSMSSWCYTHSLDGAGLFLFDHAAEEYEHAKKLIIFLNENNVPVQLTSISAPEHKFEGLTQIFQKAYEHEQHISESINNIVDHAIKSKDHATFNFLQWYVAEQHEEEVLFKDILDKIELIGNENHGLYLADQYVKGIAKSRKSGS

SEQ ID NO: 40 - protein, 408 aa, synthetic construct
HHHHHHHHGPLEVLFQGPEGVECDFSPLLSGTPPQVYNFKRLVFTNCNYNLTKLLSLFSVNDFTCSQISPAAIASNCYSSLILDYFSYPLSMKSDLSVSSAGPISQFNYKQSFSNPTCLILATVPHNLTTITKPLKYSYINKCSRLLSDDRTEVPQLVNANQRSPCVSIVPSTVAEDGDYYRKQLSPLEGGGWLVASGSTVAMTEQLQMGFGITVQNGTDTNSVCPKGSGGGGESQVRQQFSKDIEKLLNEQVNKEMQSSNLYMSMSSWCYTHSLDGAGLFLFDHAAEEYEHAKKLIIFLNENNVPVQLTSISAPEHKFEGLTQIFQKAYEHEQHISESINNIVDHAIKSKDHATFNFLQWYVAEQHEEEVLFKDILDKIELIGNENHGLYLADQYVKGIAKSRKSGS

SEQ ID NO: 41 - protein, 408 aa, synthetic construct
HHHHHHHHGPLEVLFQGPEGVECDFSPLLSGTPPQVYNFKRLVFTNCNYNLTKLLSLFSVNDFTCSQISPAAIASNCYSSLILDYFSYPLSMKSDLSVSSAGPISQFNYKQSFSNPTCLILATVPHNLTTITKPLKYSYINKCSRRLSDDRTEVPQLVNANQRSPCVSIVPSTVAEDGDYYRKQLSPLEGGGWLVASGSTVAMTEQLQMGFGITVQNGTDTNSVCPKGSGGGGESQVRQQFSKDIEKLLNEQVNKEMQSSNLYMSMSSWCYTHSLDGAGLFLFDHAAEEYEHAKKLIIFLNENNVPVQLTSISAPEHKFEGLTQIFQKAYEHEQHISESINNIVDHAIKSKDHATFNFLQWYVAEQHEEEVLFKDILDKIELIGNENHGLYLADQYVKGIAKSRKSGS

SEQ ID NO: 42 - protein, 396 aa, synthetic construct
HHHHHHHHGPLEVLFQGPNITNLCPFDEVFNATRFASVYAWNRKRISNCVADYSVLYNLAPFFTFKCYGVSPTKLNDLCFTNVYADSFVIRGDEVRQIAPGQTGNIADYNYKLPDDFTGCVIAWNSNKLDSKVSGNYNYLYRLFRKSNLKPFERDISTEIYQAGNKPCNGVAGFNCYAPLRSYSFRPTYGVGHQPYRVVVLSFENKSAPATVCGPGSGGGGESQVRQQFSKDIEKLLNEQVNKEMQSSNLYMSMSSWCYTHSLDGAGLFLFDHAAEEYEHAKKLIIFLNENNVPVQLTSISAPEHKFEGLTQIFQKAYEHEQHISESINNIVDHAIKSKDHATFNFLQWYVAEQHEEEVLFKDILDKIELIGNENHGLYLADQYVKGIAKSRKSGS

SEQ ID NO: 43 - protein, 692 aa, synthetic construct
HHHHHHHHGPLEVLFQGPNITNLCPFGEVFNATRFASVYAWNRKRISNCVADYSVLYNSASFSTFKCYGVSPTKLNDLCFTNVYADSFVIRGDEVRQIAPGQTGKIADYNYKLPDDFTGCVIAWNSNNLDSKVGGNYNYLRRLFRKSNLKPFERDISTEIYQAGSTPCNGVEGFNCYFPLQSYGFQPTNGVGYQPYRVVVLSFENKSAPATVCGPGSGGSGSSQCVNLRTRTQLPPAYTNSFTRGVYYPDKVFRSSVLHSTQDLFLPFFSNVTWFHAIHVSGTNGTKRFDNPVLPFNDGVYFASIEKSNIIRGWIFGTTLDSKTQSLLIVNNATNVVIKVCEFQFCNDPFLDVYYHKNNKSWMESGVYSSANNCTFEYVSQPFLMDLEGKQGNFKNLREFVFKNIDGYFKIYSKHTPINLVRDLPQGFSALEPLVDLPIGINITRFQTLLALHRSYLTPGDSSSGWTAGAAAYYVGYLQPRTFLLKYNENGTITDAVDCALDPLSETKCTLGSGGGGESQVRQQFSKDIEKLLNEQVNKEMQSSNLYMSMSSWCYTHSLDGAGLFLFDHAAEEYEHAKKLIIFLNENNVPVQLTSISAPEHKFEGLTQIFQKAYEHEQHISESINNIVDHAIKSKDHATFNFLQWYVAEQHEEEVLFKDILDKIELIGNENHGLYLADQYVKGIAKSRKSGS

SEQ ID NO: 44 - protein, 598 aa, synthetic construct
HHHHHHHHGPLEVLFQGPNITNLCPFGEVFNATKFPSVYAWERKKISNCVADYSVLYNSTFFSTFKCYGVSATKLNDLCFSNVYADSFVVKGDDVRQIAPGQTGVIADYNYKLPDDFMGCVLAWNTRNIDATSTGNYNYKYRYLRHGKLRPFERDISNVPFSPDGKPCTPPALNCYWPLNDYGFYTTTGIGYQPYRVVVLSFELLNAPATVCGPGSGGSGNITNLCPFGEVFNATRFASVYAWNRKRISNCVADYSVLYNSASFSTFKCYGVSPTKLNDLCFTNVYADSFVIRGDEVRQIAPGQTGKIADYNYKLPDDFTGCVIAWNSNNLDSKVGGNYNYLRRLFRKSNLKPFERDISTEIYQAGSTPCNGVEGFNCYFPLQSYGFQPTNGVGYQPYRVVVLSFENKSAPATVCGPGSGGGGESQVRQQFSKDIEKLLNEQVNKEMQSSNLYMSMSSWCYTHSLDGAGLFLFDHAAEEYEHAKKLIIFLNENNVPVQLTSISAPEHKFEGLTQIFQKAYEHEQHISESINNIVDHAIKSKDHATFNFLQWYVAEQHEEEVLFKDILDKIELIGNENHGLYLADQYVKGIAKSRKSGS

SEQ ID NO: 45 - protein, 598 aa, synthetic construct
HHHHHHHHGPLEVLFQGPNITNLCPFGEVFNATKFPSVYAWERKKISNCVADYSVLYNSTFFSTFKCYGVSATKLNDLCFSNVYADSFVVKGDDVRQIAPGQTGVIADYNYKLPDDFMGCVLAWNTRNIDATSTGNYNYKYRYLRHGKLRPFERDISNVPFSPDGKPCTPPALNCYWPLNDYGFYTTTGIGYQPYRVVVLSFELLNAPATVCGPGSGGSGNITNLCPFGEVFNATRFASVYAWNRKRISNCVADYSVLYNSASFSTFKCYGVSPTKLNDLCFTNVYADSFVIRGDEVRQIAPGQTGKIADYNYKLPDDFTGCVIAWNSNNLDSKVGGNYNYLYRLFRKSNLKPFERDISTEIYQAGSTPCNGVEGFNCYAPLQSYGFQPTNGVGYQPYRVVVLSFENKSAPATVCGPGSGGGGESQVRQQFSKDIEKLLNEQVNKEMQSSNLYMSMSSWCYTHSLDGAGLFLFDHAAEEYEHAKKLIIFLNENNVPVQLTSISAPEHKFEGLTQIFQKAYEHEQHISESINNIVDHAIKSKDHATFNFLQWYVAEQHEEEVLFKDILDKIELIGNENHGLYLADQYVKGIAKSRKSGS

SEQ ID NO: 46 - protein, 611 aa, synthetic construct
HHHHHHHHGPLEVLFQGPNITNLCPFGEVFNATRFASVYAWNRKRISNCVADYSVLYNSASFSTFKCYGVSPTKLNDLCFTNVYADSFVIRGDEVRQIAPGQTGKIADYNYKLPDDFTGCVIAWNSNNLDSKVGGNYNYLRRLFRKSNLKPFERDISTEIYQAGSTPCNGVEGFNCYFPLQSYGFQPTNGVGYQPYRVVVLSFENKSAPATVCGPGSGGSGEGVECDFSPLLSGTPPQVYNFKRLVFTNCNYNLTKLLSLFSVNDFTCSQISPAAIASNCYSSLILDYFSYPLSMKSDLSVSSAGPISQFNYKQSFSNPTCLILATVPHNLTTITKPLKYSYINKCSRLLSDDRTEVPQLVNANQYSPCVSIVPSTVAEDGDYYRKQLSPLEGGGWLVASGSTVAMTEQLQMGFGITVQNGTDTNSVCPKGSGGGGESQVRQQFSKDIEKLLNEQVNKEMQSSNLYMSMSSWCYTHSLDGAGLFLFDHAAEEYEHAKKLIIFLNENNVPVQLTSISAPEHKFEGLTQIFQKAYEHEQHISESINNIVDHAIKSKDHATFNFLQWYVAEQHEEEVLFKDILDKIELIGNENHGLYLADQYVKGIAKSRKSGS

SEQ ID NO: 47 - protein, 611 aa, synthetic construct
HHHHHHHHGPLEVLFQGPNITNLCPFGEVFNATRFASVYAWNRKRISNCVADYSVLYNSASFSTFKCYGVSPTKLNDLCFTNVYADSFVIRGDEVRQIAPGQTGKIADYNYKLPDDFTGCVIAWNSNNLDSKVGGNYNYLYRLFRKSNLKPFERDISTEIYQAGSTPCNGVEGFNCYAPLQSYGFQPTNGVGYQPYRVVVLSFENKSAPATVCGPGSGGSGEGVECDFSPLLSGTPPQVYNFKRLVFTNCNYNLTKLLSLFSVNDFTCSQISPAAIASNCYSSLILDYFSYPLSMKSDLSVSSAGPISQFNYKQSFSNPTCLILATVPHNLTTITKPLKYSYINKCSRLLSDDRTEVPQLVNANQYSPCVSIVPSTVAEDGDYYRKQLSPLEGGGWLVASGSTVAMTEQLQMGFGITVQNGTDTNSVCPKGSGGGGESQVRQQFSKDIEKLLNEQVNKEMQSSNLYMSMSSWCYTHSLDGAGLFLFDHAAEEYEHAKKLIIFLNENNVPVQLTSISAPEHKFEGLTQIFQKAYEHEQHISESINNIVDHAIKSKDHATFNFLQWYVAEQHEEEVLFKDILDKIELIGNENHGLYLADQYVKGIAKSRKSGS

SEQ ID NO: 48 - protein, 611 aa, synthetic construct
HHHHHHHHGPLEVLFQGPEGVECDFSPLLSGTPPQVYNFKRLVFTNCNYNLTKLLSLFSVNDFTCSQISPAAIASNCYSSLILDYFSYPLSMKSDLSVSSAGPISQFNYKQSFSNPTCLILATVPHNLTTITKPLKYSYINKCSRLLSDDRTEVPQLVNANQYSPCVSIVPSTVAEDGDYYRKQLSPLEGGGWLVASGSTVAMTEQLQMGFGITVQNGTDTNSVCPKGSGGSGNITNLCPFGEVFNATRFASVYAWNRKRISNCVADYSVLYNSASFSTFKCYGVSPTKLNDLCFTNVYADSFVIRGDEVRQIAPGQTGKIADYNYKLPDDFTGCVIAWNSNNLDSKVGGNYNYLRRLFRKSNLKPFERDISTEIYQAGSTPCNGVEGFNCYFPLQSYGFQPTNGVGYQPYRVVVLSFENKSAPATVCGPGSGGGGESQVRQQFSKDIEKLLNEQVNKEMQSSNLYMSMSSWCYTHSLDGAGLFLFDHAAEEYEHAKKLIIFLNENNVPVQLTSISAPEHKFEGLTQIFQKAYEHEQHISESINNIVDHAIKSKDHATFNFLQWYVAEQHEEEVLFKDILDKIELIGNENHGLYLADQYVKGIAKSRKSGS

SEQ ID NO: 49 - protein, 611 aa, synthetic construct
HHHHHHHHGPLEVLFQGPEGVECDFSPLLSGTPPQVYNFKRLVFTNCNYNLTKLLSLFSVNDFTCSQISPAAIASNCYSSLILDYFSYPLSMKSDLSVSSAGPISQFNYKQSFSNPTCLILATVPHNLTTITKPLKYSYINKCSRLLSDDRTEVPQLVNANQYSPCVSIVPSTVAEDGDYYRKQLSPLEGGGWLVASGSTVAMTEQLQMGFGITVQNGTDTNSVCPKGSGGSGNITNLCPFGEVFNATRFASVYAWNRKRISNCVADYSVLYNSASFSTFKCYGVSPTKLNDLCFTNVYADSFVIRGDEVRQIAPGQTGKIADYNYKLPDDFTGCVIAWNSNNLDSKVGGNYNYLYRLFRKSNLKPFERDISTEIYQAGSTPCNGVEGFNCYAPLQSYGFQPTNGVGYQPYRVVVLSFENKSAPATVCGPGSGGGGESQVRQQFSKDIEKLLNEQVNKEMQSSNLYMSMSSWCYTHSLDGAGLFLFDHAAEEYEHAKKLIIFLNENNVPVQLTSISAPEHKFEGLTQIFQKAYEHEQHISESINNIVDHAIKSKDHATFNFLQWYVAEQHEEEVLFKDILDKIELIGNENHGLYLADQYVKGIAKSRKSGS

SEQ ID NO: 50 - protein, 1315 aa, synthetic construct
SSQCVNLTTRTQLPPAYTNSFTRGVYYPDKVFRSSVLHSTQDLFLPFFSNVTWFHVISGTNGTKRFDNPVLPFNDGVYFASIEKSNIIRGWIFGTTLDSKTQSLLIVNNATNVVIKVCEFQFCNDPFLDHKNNKSWMESEFRVYSSANNCTFEYVSQPFLMDLEGKQGNFKNLREFVFKNIDGYFKIYSKHTPIIVREPEDLPQGFSALEPLVDLPIGINITRFQTLLALHRSYLTPGDSSSGWTAGAAAYYVGYLQPRTFLLKYNENGTITDAVDCALDPLSETKCTLKSFTVEKGIYQTSNFRVQPTESIVRFPNITNLCPFDEVFNATRFASVYAWNRKRISNCVADYSVLYNLAPFFTFKCYGVSPTKLNDLCFTNVYADSFVIRGDEVRQIAPGQTGNIADYNYKLPDDFTGCVIAWNSNKLDSKVSGNYNYLYRLFRKSNLKPFERDISTEIYQAGNKPCNGVAGFNCYFPLRSYSFRPTYGVGHQPYRVVVLSFELLHAPATVCGPKKSTNLVKNKCVNFNFNGLKGTGVLTESNKKFLPFQQFGRDIADTTDAVRDPQTLEILDITPCSFGGVSVITPGTNTSNQVAVLYQGVNCTEVPVAIHADQLTPTWRVYSTGSNVFQTRAGCLIGAEYVNNSYECDIPIGAGICASYQTQTKSHGSASSVASQSIIAYTMSLGVENSVAYSNNSIAIPTNFTISVTTEILPVSMTKTSVDCTMYICGDSTECSNLLLQYGSFCTQLKRALTGIAVEQDKNTQEVFAQVKQIYKTPPIKYFGGFNFSQILPDPSKPSKRSFIEDLLFNKVTLADAGFIKQYGDCLGDIAARDLICAQKFKGLTVLPPLLTDEMIAQYTSALLAGTITSGWTFGAGAALQIPFAMQMAYRFNGIGVTQNVLYENQKLIANQFNSAIGKIQDSLSSTASALGKLQDVVNHNAQALNTLVKQLSSKFGAISSVLNDIFSRLDPPEAEVQIDRLITGRLQSLQTYVTQQLIRAAEIRASANLAATKMSECVLGQSKRVDFCGKGYHLMSFPQSAPHGVVFLHVTYVPAQEKNFTTAPAICHDGKAHFPREGVFVSNGTHWFVTQRNFYEPQIITTDNTFVSGNCDVVIGIVNNTVYDPLQSELDSIKEELDKIHKNGSGGSGDIIKLLNEQVNKEMQSSNLYMSMSSWCYTHSLDGAGLFLFDHAAEEYEHAKKLIIFLNENNVPVQLTSISAPEHKFEGLTQIFQKAYEHEQHISESINNIVDHAIKSKDHATFNFLQWYVAEQHEEEVLFKDILDKIELIGNENHGLYLADQYVKGIAKSRKSGS

SEQ ID NO: 51 - protein, 795 aa, synthetic construct
HHHHHHHHGPLEVLFQGPNITNLCPFGEVFNATKFPSVYAWERKKISNCVADYSVLYNSTFFSTFKCYGVSATKLNDLCFSNVYADSFVVKGDDVRQIAPGQTGVIADYNYKLPDDFMGCVLAWNTRNIDATSTGNYNYKYRYLRHGKLRPFERDISNVPFSPDGKPCTPPALNCYWPLNDYGFYTTTGIGYQPYRVVVLSFELLNAPATVCGPGSGSCALDPLSETKCTLKSFTVEKGIYQTSNFRVQPTESIVRFPNITNLCPFGEVFNATRFASVYAWNRKRISNCVADYSVLYNSASFSTFKCYGVSPTKLNDLCFTNVYADSFVIRGDEVRQIAPGQTGKIADYNYKLPDDFTGCVIAWNSNNLDSKVGGNYNYLYRLFRKSNLKPFERDISTEIYQAGSTPCNGVEGFNCYFPLQSYGFQPTNGVGYQPYRVVVLSFELLHAPATVCGPKKSTNLVKNKCVNFNFNGLTGTGVLTESNKKFLPFQQFGRDIADTTDAVRDPQTLEILDITPCSFGGVSVITPGTNTSNQVAVLYQDVNCTEVPVAIHADQLTPTWRVYSTGSNVFQTRAGCLIGAEHVNNSYECDIPIGAGICASYQTGGSQSIIAYTGSGGGGESQVRQQFSKDIEKLLNEQVNKEMQSSNLYMSMSSWCYTHSLDGAGLFLFDHAAEEYEHAKKLIIFLNENNVPVQLTSISAPEHKFEGLTQIFQKAYEHEQHISESINNIVDHAIKSKDHATFNFLQWYVAEQHEEEVLFKDILDKIELIGNENHGLYLADQYVKGIAKSRKSGS

SEQ ID NO: 52 - protein, 1076 aa, synthetic construct
HHHHHHHHGPLEVLFQGPNITNLCPFGEVFNATKFPSVYAWERKKISNCVADYSVLYNSTFFSTFKCYGVSATKLNDLCFSNVYADSFVVKGDDVRQIAPGQTGVIADYNYKLPDDFMGCVLAWNTRNIDATSTGNYNYKYRYLRHGKLRPFERDISNVPFSPDGKPCTPPALNCYWPLNDYGFYTTTGIGYQPYRVVVLSFELLNAPATVCGPGSGGSGSSQCVNLTTRTQLPPAYTNSFTRGVYYPDKVFRSSVLHSTQDLFLPFFSNVTWFHAIHVSGTNGTKRFDNPVLPFNDGVYFASTEKSNIIRGWIFGTTLDSKTQSLLIVNNATNVVIKVCEFQFCNDPFLGVYYHKNNKSWMESEFRVYSSANNCTFEYVSQPFLMDLEGKQGNFKNLREFVFKNIDGYFKIYSKHTPINLVRDLPQGFSALEPLVDLPIGINITRFQTLLALHRSYLTPGDSSSGWTAGAAAYYVGYLQPRTFLLKYNENGTITDAVDCALDPLSETKCTLKSFTVEKGIYQTSNFRVQPTESIVRFPNITNLCPFGEVFNATRFASVYAWNRKRISNCVADYSVLYNSASFSTFKCYGVSPTKLNDLCFTNVYADSFVIRGDEVRQIAPGQTGKIADYNYKLPDDFTGCVIAWNSNNLDSKVGGNYNYLYRLFRKSNLKPFERDISTEIYQAGSTPCNGVEGFNCYFPLQSYGFQPTNGVGYQPYRVVVLSFELLHAPATVCGPKKSTNLVKNKCVNFNFNGLTGTGVLTESNKKFLPFQQFGRDIADTTDAVRDPQTLEILDITPCSFGGVSVITPGTNTSNQVAVLYQDVNCTEVPVAIHADQLTPTWRVYSTGSNVFQTRAGCLIGAEHVNNSYECDIPIGAGICASYQTGGSQSIIAYTGSGGGGESQVRQQFSKDIEKLLNEQVNKEMQSSNLYMSMSSWCYTHSLDGAGLFLFDHAAEEYEHAKKLIIFLNENNVPVQLTSISAPEHKFEGLTQIFQKAYEHEQHISESINNIVDHAIKSKDHATFNFLQWYVAEQHEEEVLFKDILDKIELIGNENHGLYLADQYVKGIAKSRKSGS

SEQ ID NO: 53 - protein, 1257 aa, synthetic construct
HHHHHHHHGPLEVLFQGPNITNLCPFGEVFNATKFPSVYAWERKKISNCVADYSVLYNSTFFSTFKCYGVSATKLNDLCFSNVYADSFVVKGDDVRQIAPGQTGVIADYNYKLPDDFMGCVLAWNTRNIDATSTGNYNYKYRYLRHGKLRPFERDISNVPFSPDGKPCTPPALNCYWPLNDYGFYTTTGIGYQPYRVVVLSFELLNAPATVCGPGSGSCALDPLSETKCTLKSFTVEKGIYQTSNFRVQPTESIVRFPNITNLCPFGEVFNATRFASVYAWNRKRISNCVADYSVLYNSASFSTFKCYGVSPTKLNDLCFTNVYADSFVIRGDEVRQIAPGQTGKIADYNYKLPDDFTGCVIAWNSNNLDSKVGGNYNYLYRLFRKSNLKPFERDISTEIYQAGSTPCNGVEGFNCYFPLQSYGFQPTNGVGYQPYRVVVLSFELLHAPATVCGPKKSTNLVKNKCVNFNFNGLTGTGVLTESNKKFLPFQQFGRDIADTTDAVRDPQTLEILDITPCSFGGVSVITPGTNTSNQVAVLYQDVNCTEVPVAIHADQLTPTWRVYSTGSNVFQTRAGCLIGAEHVNNSYECDIPIGAGICASYQTQTNSPGSASSVASQSIIAYTMSLGAENSVAYSNNSIAIPTNFTISVTTEILPVSMTKTSVDCTMYICGDSTECSNLLLQYGSFCTQLNRALTGIAVEQDKNTQEVFAQVKQIYKTPPIKDFGGFNFSQILPDPSKPSKRSPIEDLLFNKVTLADAGFIKQYGDCLGDIAARDLICAQKFNGLTVLPPLLTDEMIAQYTSALLAGTITSGWTFGAGPALQIPFPMQMAYRFNGIGVTQNVLYENQKLIANQFNSAIGKIQDSLSSTPSALGKLQDVVNQNAQALNTLVKQLSSNFGAISSVLNDILSRLDPPEAEVQIDRLITGRLQSLQTYVTQQLIRAAEIRASANLAATKMSECVLGQSKRVDFCGKGYHLMSFPQSAPHGVVFLHVTYVPAQEKNFTTAPAICHDGKAHFPREGVFVSNGTHWFVTQRNFYEPQIITTDNTFVSGNCDVVIGIVNNTVYDPLQSELDSIKEELDKIHKNGSGGSGDIIKLLNEQVNKEMQSSNLYMSMSSWCYTHSLDGAGLFLFDHAAEEYEHAKKLIIFLNENNVPVQLTSISAPEHKFEGLTQIFQKAYEHEQHISESINNIVDHAIKSKDHATFNFLQWYVAEQHEEEVLFKDILDKIELIGNENHGLYLADQYVKGIAKSRKSGS

SEQ ID NO: 54 - protein, 1538 aa, synthetic construct
HHHHHHHHGPLEVLFQGPNITNLCPFGEVFNATKFPSVYAWERKKISNCVADYSVLYNSTFFSTFKCYGVSATKLNDLCFSNVYADSFVVKGDDVRQIAPGQTGVIADYNYKLPDDFMGCVLAWNTRNIDATSTGNYNYKYRYLRHGKLRPFERDISNVPFSPDGKPCTPPALNCYWPLNDYGFYTTTGIGYQPYRVVVLSFELLNAPATVCGPGSGGSGSSQCVNLTTRTQLPPAYTNSFTRGVYYPDKVFRSSVLHSTQDLFLPFFSNVTWFHAIHVSGTNGTKRFDNPVLPFNDGVYFASTEKSNIIRGWIFGTTLDSKTQSLLIVNNATNVVIKVCEFQFCNDPFLGVYYHKNNKSWMESEFRVYSSANNCTFEYVSQPFLMDLEGKQGNFKNLREFVFKNIDGYFKIYSKHTPINLVRDLPQGFSALEPLVDLPIGINITRFQTLLALHRSYLTPGDSSSGWTAGAAAYYVGYLQPRTFLLKYNENGTITDAVDCALDPLSETKCTLKSFTVEKGIYQTSNFRVQPTESIVRFPNITNLCPFGEVFNATRFASVYAWNRKRISNCVADYSVLYNSASFSTFKCYGVSPTKLNDLCFTNVYADSFVIRGDEVRQIAPGQTGKIADYNYKLPDDFTGCVIAWNSNNLDSKVGGNYNYLYRLFRKSNLKPFERDISTEIYQAGSTPCNGVEGFNCYFPLQSYGFQPTNGVGYQPYRVVVLSFELLHAPATVCGPKKSTNLVKNKCVNFNFNGLTGTGVLTESNKKFLPFQQFGRDIADTTDAVRDPQTLEILDITPCSFGGVSVITPGTNTSNQVAVLYQDVNCTEVPVAIHADQLTPTWRVYSTGSNVFQTRAGCLIGAEHVNNSYECDIPIGAGICASYQTQTNSPGSASSVASQSIIAYTMSLGAENSVAYSNNSIAIPTNFTISVTTEILPVSMTKTSVDCTMYICGDSTECSNLLLQYGSFCTQLNRALTGIAVEQDKNTQEVFAQVKQIYKTPPIKDFGGFNFSQILPDPSKPSKRSPIEDLLFNKVTLADAGFIKQYGDCLGDIAARDLICAQKFNGLTVLPPLLTDEMIAQYTSALLAGTITSGWTFGAGPALQIPFPMQMAYRFNGIGVTQNVLYENQKLIANQFNSAIGKIQDSLSSTPSALGKLQDVVNQNAQALNTLVKQLSSNFGAISSVLNDILSRLDPPEAEVQIDRLITGRLQSLQTYVTQQLIRAAEIRASANLAATKMSECVLGQSKRVDFCGKGYHLMSFPQSAPHGVVFLHVTYVPAQEKNFTTAPAICHDGKAHFPREGVFVSNGTHWFVTQRNFYEPQIITTDNTFVSGNCDVVIGIVNNTVYDPLQSELDSIKEELDKIHKNGSGGSGDIIKLLNEQVNKEMQSSNLYMSMSSWCYTHSLDGAGLFLFDHAAEEYEHAKKLIIFLNENNVPVQLTSISAPEHKFEGLTQIFQKAYEHEQHISESINNIVDHAIKSKDHATFNFLQWYVAEQHEEEVLFKDILDKIELIGNENHGLYLADQYVKGIAKSRKSGS

SEQ ID NO: 55 - protein, 894 aa, synthetic construct
HHHHHHHHGPLEVLFQGPNITNLCPFGEVFNATKFPSVYAWERKKISNCVADYSVLYNSTFFSTFKCYGVSATKLNDLCFSNVYADSFVVKGDDVRQIAPGQTGVIADYNYKLPDDFMGCVLAWNTRNIDATSTGNYNYKYRYLRHGKLRPFERDISNVPFSPDGKPCTPPALNCYWPLNDYGFYTTTGIGYQPYRVVVLSFELLNAPATVCGPGSGGNITNLCPFGEVFNATRFASVYAWNRKRISNCVADYSVLYNSASFSTFKCYGVSPTKLNDLCFTNVYADSFVIRGDEVRQIAPGQTGKIADYNYKLPDDFTGCVIAWNSNNLDSKVGGNYNYLRRLFRKSNLKPFERDISTEIYQAGSTPCNGVEGFNCYFPLQSYGFQPTNGVGYQPYRVVVLSFENKSAPATVCGPGSGGSGSSQCVNLTTRTQLPPAYTNSFTRGVYYPDKVFRSSVLHSTQDLFLPFFSNVTWFHAIHVSGTNGTKRFDNPVLPFNDGVYFASTEKSNIIRGWIFGTTLDSKTQSLLIVNNATNVVIKVCEFQFCNDPFLGVYYHKNNKSWMESEFRVYSSANNCTFEYVSQPFLMDLEGKQGNFKNLREFVFKNIDGYFKIYSKHTPINLVRDLPQGFSALEPLVDLPIGINITRFQTLLALHRSYLTPGDSSSGWTAGAAAYYVGYLQPRTFLLKYNENGTITDAVDCALDPLSETKCTLGSGGGGESQVRQQFSKDIEKLLNEQVNKEMQSSNLYMSMSSWCYTHSLDGAGLFLFDHAAEEYEHAKKLIIFLNENNVPVQLTSISAPEHKFEGLTQIFQKAYEHEQHISESINNIVDHAIKSKDHATFNFLQWYVAEQHEEEVLFKDILDKIELIGNENHGLYLADQYVKGIAKSRKSGS

SEQ ID NO: 56 - protein, 1175 aa, synthetic construct
HHHHHHHHGPLEVLFQGPNITNLCPFGEVFNATKFPSVYAWERKKISNCVADYSVLYNSTFFSTFKCYGVSATKLNDLCFSNVYADSFVVKGDDVRQIAPGQTGVIADYNYKLPDDFMGCVLAWNTRNIDATSTGNYNYKYRYLRHGKLRPFERDISNVPFSPDGKPCTPPALNCYWPLNDYGFYTTTGIGYQPYRVVVLSFELLNAPATVCGPGSGGLDRCTTFDDVQAPNYTQHTSSMRGVYYPDEIFRSDTLYLTQDLFLPFYSNVTGFHTINHTFGNPVIPFKDGIYFAATEKSNVVRGWVFGSTMNNKSQSVIIINNSTNVVIRACNFELCDNPFFAVSKPMGTQTHTMIFDNAFNCTFEYISDAFSLDVSEKSGNFKHLREFVFKNKDGFLYVYKGYQPIDVVRDLPSGFNTLKPIFKLPLGINITNFRAILTAFSPAQDIWGTSAAAYFVGYLKPTTFMLKYDENGTITDAVDCSQNPLAELKCSVGSGGSGNITNLCPFGEVFNATRFASVYAWNRKRISNCVADYSVLYNSASFSTFKCYGVSPTKLNDLCFTNVYADSFVIRGDEVRQIAPGQTGKIADYNYKLPDDFTGCVIAWNSNNLDSKVGGNYNYLRRLFRKSNLKPFERDISTEIYQAGSTPCNGVEGFNCYFPLQSYGFQPTNGVGYQPYRVVVLSFENKSAPATVCGPGSGGSGSSQCVNLTTRTQLPPAYTNSFTRGVYYPDKVFRSSVLHSTQDLFLPFFSNVTWFHAIHVSGTNGTKRFDNPVLPFNDGVYFASTEKSNIIRGWIFGTTLDSKTQSLLIVNNATNVVIKVCEFQFCNDPFLGVYYHKNNKSWMESEFRVYSSANNCTFEYVSQPFLMDLEGKQGNFKNLREFVFKNIDGYFKIYSKHTPINLVRDLPQGFSALEPLVDLPIGINITRFQTLLALHRSYLTPGDSSSGWTAGAAAYYVGYLQPRTFLLKYNENGTITDAVDCALDPLSETKCTLGSGGGGESQVRQQFSKDIEKLLNEQVNKEMQSSNLYMSMSSWCYTHSLDGAGLFLFDHAAEEYEHAKKLIIFLNENNVPVQLTSISAPEHKFEGLTQIFQKAYEHEQHISESINNIVDHAIKSKDHATFNFLQWYVAEQHEEEVLFKDILDKIELIGNENHGLYLADQYVKGIAKSRKSGS

SEQ ID NO: 57 - protein, 902 aa, synthetic construct
HHHHHHHHGPLEVLFQGPNITNLCPFGEVFNATRFASVYAWNRKRISNCVADYSVLYNSASFSTFKCYGVSPTKLNDLCFTNVYADSFVIRGDEVRQIAPGQTGKIADYNYKLPDDFTGCVIAWNSNNLDSKVGGNYNYLRRLFRKSNLKPFERDISTEIYQAGSTPCNGVEGFNCYFPLQSYGFQPTNGVGYQPYRVVVLSFENKSAPATVCGPGSGGSGSSQCVNLTTRTQLPPAYTNSFTRGVYYPDKVFRSSVLHSTQDLFLPFFSNVTWFHAIHVGSGGSGNITNLCPFGEVFNATKFPSVYAWERKKISNCVADYSVLYNSTFFSTFKCYGVSATKLNDLCFSNVYADSFVVKGDDVRQIAPGQTGVIADYNYKLPDDFMGCVLAWNTRNIDATSTGNYNYKYRYLRHGKLRPFERDISNVPFSPDGKPCTPPALNCYWPLNDYGFYTTTGIGYQPYRVVVLSFELLNAPATVCGPGSGGSGSGTNGTKRFDNPVLPFNDGVYFASTEKSNIIRGWIFGTTLDSKTQSLLIVNNATNVVIKVCEFQFCNDPFLGVYYHKNNKSWMESEFRVYSSANNCTFEYVSQPFLMDLEGKQGNFKNLREFVFKNIDGYFKIYSKHTPINLVRDLPQGFSALEPLVDLPIGINITRFQTLLALHRSYLTPGDSSSGWTAGAAAYYVGYLQPRTFLLKYNENGTITDAVDCALDPLSETKCTLGSGGGGESQVRQQFSKDIEKLLNEQVNKEMQSSNLYMSMSSWCYTHSLDGAGLFLFDHAAEEYEHAKKLIIFLNENNVPVQLTSISAPEHKFEGLTQIFQKAYEHEQHISESINNIVDHAIKSKDHATFNFLQWYVAEQHEEEVLFKDILDKIELIGNENHGLYLADQYVKGIAKSRKSGS

SEQ ID NO: 58 - protein, 902 aa, synthetic construct
HHHHHHHHGPLEVLFQGPNITNLCPFGEVFNATRFASVYAWNRKRISNCVADYSVLYNSASFSTFKCYGVSPTKLNDLCFTNVYADSFVIRGDEVRQIAPGQTGKIADYNYKLPDDFTGCVIAWNSNNLDSKVGGNYNYLRRLFRKSNLKPFERDISTEIYQAGSTPCNGVEGFNCYFPLQSYGFQPTNGVGYQPYRVVVLSFENKSAPATVCGPGSGGSGSSQCVNLTTRTQLPPAYTNSFTRGVYYPDKVFRSSVLHSTQDLFLPFFSNVTWFHAIHVSGTNGTKRFDNPVLPFNDGVYFASTEKSNIIRGWIFGTTLDSKTQSLLIVNNATNVVIKVCEFQFCNDPFLGVYYHKNGSGGSGNITNLCPFGEVFNATKFPSVYAWERKKISNCVADYSVLYNSTFFSTFKCYGVSATKLNDLCFSNVYADSFVVKGDDVRQIAPGQTGVIADYNYKLPDDFMGCVLAWNTRNIDATSTGNYNYKYRYLRHGKLRPFERDISNVPFSPDGKPCTPPALNCYWPLNDYGFYTTTGIGYQPYRVVVLSFELLNAPATVCGPGSGGSGNKSWMESEFRVYSSANNCTFEYVSQPFLMDLEGKQGNFKNLREFVFKNIDGYFKIYSKHTPINLVRDLPQGFSALEPLVDLPIGINITRFQTLLALHRSYLTPGDSSSGWTAGAAAYYVGYLQPRTFLLKYNENGTITDAVDCALDPLSETKCTLGSGGGGESQVRQQFSKDIEKLLNEQVNKEMQSSNLYMSMSSWCYTHSLDGAGLFLFDHAAEEYEHAKKLIIFLNENNVPVQLTSISAPEHKFEGLTQIFQKAYEHEQHISESINNIVDHAIKSKDHATFNFLQWYVAEQHEEEVLFKDILDKIELIGNENHGLYLADQYVKGIAKSRKSGS

SEQ ID NO: 59 - protein, 902 aa, synthetic construct
HHHHHHHHGPLEVLFQGPNITNLCPFGEVFNATRFASVYAWNRKRISNCVADYSVLYNSASFSTFKCYGVSPTKLNDLCFTNVYADSFVIRGDEVRQIAPGQTGKIADYNYKLPDDFTGCVIAWNSNNLDSKVGGNYNYLRRLFRKSNLKPFERDISTEIYQAGSTPCNGVEGFNCYFPLQSYGFQPTNGVGYQPYRVVVLSFENKSAPATVCGPGSGGSGSSQCVNLTTRTQLPPAYTNSFTRGVYYPDKVFRSSVLHSTQDLFLPFFSNVTWFHAIHVSGTNGTKRFDNPVLPFNDGVYFASTEKSNIIRGWIFGTTLDSKTQSLLIVNNATNVVIKVCEFQFCNDPFLGVYYHKNNKSWMESEFRVYSSANGSGGSGNITNLCPFGEVFNATKFPSVYAWERKKISNCVADYSVLYNSTFFSTFKCYGVSATKLNDLCFSNVYADSFVVKGDDVRQIAPGQTGVIADYNYKLPDDFMGCVLAWNTRNIDATSTGNYNYKYRYLRHGKLRPFERDISNVPFSPDGKPCTPPALNCYWPLNDYGFYTTTGIGYQPYRVVVLSFELLNAPATVCGPGSGGSGNCTFEYVSQPFLMDLEGKQGNFKNLREFVFKNIDGYFKIYSKHTPINLVRDLPQGFSALEPLVDLPIGINITRFQTLLALHRSYLTPGDSSSGWTAGAAAYYVGYLQPRTFLLKYNENGTITDAVDCALDPLSETKCTLGSGGGGESQVRQQFSKDIEKLLNEQVNKEMQSSNLYMSMSSWCYTHSLDGAGLFLFDHAAEEYEHAKKLIIFLNENNVPVQLTSISAPEHKFEGLTQIFQKAYEHEQHISESINNIVDHAIKSKDHATFNFLQWYVAEQHEEEVLFKDILDKIELIGNENHGLYLADQYVKGIAKSRKSGS

SEQ ID NO: 60 - protein, 1551 aa, synthetic construct
HHHHHHHHGPLEVLFQGPEGVECDFSPLLSGTPPQVYNFKRLVFTNCNYNLTKLLSLFSVNDFTCSQISPAAIASNCYSSLILDYFSYPLSMKSDLSVSSAGPISQFNYKQSFSNPTCLILATVPHNLTTITKPLKYSYINKCSRLLSDDRTEVPQLVNANQYSPCVSIVPSTVWEDGDYYRKQLSPLEGGGWLVASGSTVAMTEQLQMGFGITVQNGTDTNSVCPKGSGGSGSSQCVNLTTRTQLPPAYTNSFTRGVYYPDKVFRSSVLHSTQDLFLPFFSNVTWFHAIHVSGTNGTKRFDNPVLPFNDGVYFASTEKSNIIRGWIFGTTLDSKTQSLLIVNNATNVVIKVCEFQFCNDPFLGVYYHKNNKSWMESEFRVYSSANNCTFEYVSQPFLMDLEGKQGNFKNLREFVFKNIDGYFKIYSKHTPINLVRDLPQGFSALEPLVDLPIGINITRFQTLLALHRSYLTPGDSSSGWTAGAAAYYVGYLQPRTFLLKYNENGTITDAVDCALDPLSETKCTLKSFTVEKGIYQTSNFRVQPTESIVRFPNITNLCPFGEVFNATRFASVYAWNRKRISNCVADYSVLYNSASFSTFKCYGVSPTKLNDLCFTNVYADSFVIRGDEVRQIAPGQTGKIADYNYKLPDDFTGCVIAWNSNNLDSKVGGNYNYLYRLFRKSNLKPFERDISTEIYQAGSTPCNGVEGFNCYFPLQSYGFQPTNGVGYQPYRVVVLSFELLHAPATVCGPKKSTNLVKNKCVNFNFNGLTGTGVLTESNKKFLPFQQFGRDIADTTDAVRDPQTLEILDITPCSFGGVSVITPGTNTSNQVAVLYQDVNCTEVPVAIHADQLTPTWRVYSTGSNVFQTRAGCLIGAEHVNNSYECDIPIGAGICASYQTQTNSPGSASSVASQSIIAYTMSLGAENSVAYSNNSIAIPTNFTISVTTEILPVSMTKTSVDCTMYICGDSTECSNLLLQYGSFCTQLNRALTGIAVEQDKNTQEVFAQVKQIYKTPPIKDFGGFNFSQILPDPSKPSKRSPIEDLLFNKVTLADAGFIKQYGDCLGDIAARDLICAQKFNGLTVLPPLLTDEMIAQYTSALLAGTITSGWTFGAGPALQIPFPMQMAYRFNGIGVTQNVLYENQKLIANQFNSAIGKIQDSLSSTPSALGKLQDVVNQNAQALNTLVKQLSSNFGAISSVLNDILSRLDPPEAEVQIDRLITGRLQSLQTYVTQQLIRAAEIRASANLAATKMSECVLGQSKRVDFCGKGYHLMSFPQSAPHGVVFLHVTYVPAQEKNFTTAPAICHDGKAHFPREGVFVSNGTHWFVTQRNFYEPQIITTDNTFVSGNCDVVIGIVNNTVYDPLQSELDSIKEELDKIHKNGSGGSGDIIKLLNEQVNKEMQSSNLYMSMSSWCYTHSLDGAGLFLFDHAAEEYEHAKKLIIFLNENNVPVQLTSISAPEHKFEGLTQIFQKAYEHEQHISESINNIVDHAIKSKDHATFNFLQWYVAEQHEEEVLFKDILDKIELIGNENHGLYLADQYVKGIAKSRKSGS

SEQ ID NO: 61 - protein, 1753 aa, synthetic construct
HHHHHHHHGPLEVLFQGPEGVECDFSPLLSGTPPQVYNFKRLVFTNCNYNLTKLLSLFSVNDFTCSQISPAAIASNCYSSLILDYFSYPLSMKSDLSVSSAGPISQFNYKQSFSNPTCLILATVPHNLTTITKPLKYSYINKCSRLLSDDRTEVPQLVNANQYSPCVSIVPSTVWEDGDYYRKQLSPLEGGGWLVASGSTVAMTEQLQMGFGITVQNGTDTNSVCPKGSGGSGNITNLCPFGEVFNATKFPSVYAWERKKISNCVADYSVLYNSTFFSTFKCYGVSATKLNDLCFSNVYADSFVVKGDDVRQIAPGQTGVIADYNYKLPDDFMGCVLAWNTRNIDATSTGNYNYKYRYLRHGKLRPFERDISNVPFSPDGKPCTPPALNCYWPLNDYGFYTTTGIGYQPYRVVVLSFELLNAPATVCGPGSGGSGSSQCVNLTTRTQLPPAYTNSFTRGVYYPDKVFRSSVLHSTQDLFLPFFSNVTWFHAIHVSGTNGTKRFDNPVLPFNDGVYFASTEKSNIIRGWIFGTTLDSKTQSLLIVNNATNVVIKVCEFQFCNDPFLGVYYHKNNKSWMESEFRVYSSANNCTFEYVSQPFLMDLEGKQGNFKNLREFVFKNIDGYFKIYSKHTPINLVRDLPQGFSALEPLVDLPIGINITRFQTLLALHRSYLTPGDSSSGWTAGAAAYYVGYLQPRTFLLKYNENGTITDAVDCALDPLSETKCTLKSFTVEKGIYQTSNFRVQPTESIVRFPNITNLCPFGEVFNATRFASVYAWNRKRISNCVADYSVLYNSASFSTFKCYGVSPTKLNDLCFTNVYADSFVIRGDEVRQIAPGQTGKIADYNYKLPDDFTGCVIAWNSNNLDSKVGGNYNYLYRLFRKSNLKPFERDISTEIYQAGSTPCNGVEGFNCYFPLQSYGFQPTNGVGYQPYRVVVLSFELLHAPATVCGPKKSTNLVKNKCVNFNFNGLTGTGVLTESNKKFLPFQQFGRDIADTTDAVRDPQTLEILDITPCSFGGVSVITPGTNTSNQVAVLYQDVNCTEVPVAIHADQLTPTWRVYSTGSNVFQTRAGCLIGAEHVNNSYECDIPIGAGICASYQTQTNSPGSASSVASQSIIAYTMSLGAENSVAYSNNSIAIPTNFTISVTTEILPVSMTKTSVDCTMYICGDSTECSNLLLQYGSFCTQLNRALTGIAVEQDKNTQEVFAQVKQIYKTPPIKDFGGFNFSQILPDPSKPSKRSPIEDLLFNKVTLADAGFIKQYGDCLGDIAARDLICAQKFNGLTVLPPLLTDEMIAQYTSALLAGTITSGWTFGAGPALQIPFPMQMAYRFNGIGVTQNVLYENQKLIANQFNSAIGKIQDSLSSTPSALGKLQDVVNQNAQALNTLVKQLSSNFGAISSVLNDILSRLDPPEAEVQIDRLITGRLQSLQTYVTQQLIRAAEIRASANLAATKMSECVLGQSKRVDFCGKGYHLMSFPQSAPHGVVFLHVTYVPAQEKNFTTAPAICHDGKAHFPREGVFVSNGTHWFVTQRNFYEPQIITTDNTFVSGNCDVVIGIVNNTVYDPLQSELDSIKEELDKIHKNGSGGSGDIIKLLNEQVNKEMQSSNLYMSMSSWCYTHSLDGAGLFLFDHAAEEYEHAKKLIIFLNENNVPVQLTSISAPEHKFEGLTQIFQKAYEHEQHISESINNIVDHAIKSKDHATFNFLQWYVAEQHEEEVLFKDILDKIELIGNENHGLYLADQYVKGIAKSRKSGS

SEQ ID NO: 62 - protein, 205 aa, synthetic construct
NITNLCPFDEVFNATRFASVYAWNRKRISNCVADYSVLYNFAPFFAFKCYGVSPTKLNDLCFTNVYADSFVIRGNEVSQIAPGQTGNIADYNYKLPDDFTGCVIAWNSNKLDSKVGGNYNYQYRLFRKSNLKPFERDISTEIYQAGNKPCNGVAGFNCYFPLRSYGFRPTYGVGHQPYRVVVLSFELLHAPATVCGPGSHHHHHH

SEQ ID NO: 63 - protein, 1311 aa, synthetic construct
SSQCVNLTTRTQLPPAYTNSFTRGVYYPDKVFRSSVLHSTQDLFLPFFSNVTWFHAIHVSGTNGTKRFDNPVLPFNDGVYFASTEKSNIIRGWIFGTTLDSKTQSLLIVNNATNVVIKVCEFQFCNDPFLGVYYHKNNKSWMESEFRVYSSANNCTFEYVSQPFLMDLEGKQGNFKNLREFVFKNIDGYFKIYSKHTPINLVRDLPQGFSALEPLVDLPIGINITRFQTLLALHRSYLTPGDSSSGWTAGAAAYYVGYLQPRTFLLKYNENGTITDAVDCALDPLSETKCTLKSFTVEKGIYQTSNFRVQPTESIVRFPNITNLCPFGEVFNATRFASVYAWNRKRISNCVADYSVLYNSASFSTFKCYGVSPTKLNDLCFTNVYADSFVIRGDEVRQIAPGQTGKIADYNYKLPDDFTGCVIAWNSNNLDSKVGGNYNYLYRLFRKSNLKPFERDISTEIYQAGSTPCNGVEGFNCYFPLQSYGFQPTNGVGYQPYRVVVLSFELLHAPATVCGPKKSTNLVKNKCVNFNFNGLTGTGVLTESNKKFLPFQQFGRDIADTTDAVRDPQTLEILDITPCSFGGVSVITPGTNTSNQVAVLYQDVNCTEVPVAIHADQLTPTWRVYSTGSNVFQTRAGCLIGAEHVNNSYECDIPIGAGICASYQGGGSGGGSSIIAYTMSLGAENSVACSNNSIAIPTNFTISVTTEILPVSMTKTSVDCTMYICGDSTECSNLLLQYGSFCTQLNRALTGIAVEQDKNTQEVFAQVKQIYKTPPIKDFGGFNFSQILPDPSKPSKRSPIEDLLFNKVTLADAGFIKQYGDCLGDIAARDLICAQKFNGLTVLPPLLTDEMIAQYTSALLAGTICSGWTFGAGPALQIPFPMQMAYRFNGIGVTQNVLYENQKLIANQFNSAIGKIQDSLSSTPSALGKLQDVVNQNAQALNTLVKQLSSNFGAISSVLNDILSRLDKPEAEVQIDRLITGRLQSLQTYVTQQLIRAAEIRASANLAATKMSECVLGQSKRVDFCGKGYHLMSFPQSAPHGVVFLHVTYVPAQEKNFTTAPAICHDGKAHFPREGVFVSNGTHWFVTQRNFYEPQIITTDNTFVSGNCDVVIGIVNNTVYDPLQSELDSIKEELDKIHKNGSGGSGDIIKLLNEQVNKEMQSSNLYMSMSSWCYTHSLDGAGLFLFDHAAEEYEHAKKLIIFLNENNVPVQLTSISAPEHKFEGLTQIFQKAYEHEQHISESINNIVDHAIKSKDHATFNFLQWYVAEQHEEEVLFKDILDKIELIGNENHGLYLADQYVKGIAKSRKSGS

SEQ ID NO: 64 - protein, 1531 aa, synthetic construct
HHHHHHHHGPLEVLFQGPNITNLCPFGEVFNATKFPSVYAWERKKISNCVADYSVLYNSTFFSTFKCYGVSATKLNDLCFSNVYADSFVVKGDDVRQIAPGQTGVIADYNYKLPDDFMGCVLAWNTRNIDATSTGNYNYKYRYLRHGKLRPFERDISNVPFSPDGKPCTPPALNCYWPLNDYGFYTTTGIGYQPYRVVVLSFELLNAPATVCGPGSGGSGSSQCVNLTTRTQLPPAYTNSFTRGVYYPDKVFRSSVLHSTQDLFLPFFSNVTWFHAIHVSGTNGTKRFDNPVLPFNDGVYFASTEKSNIIRGWIFGTTLDSKTQSLLIVNNATNVVIKVCEFQFCNDPFLGVYYHKNNKSWMESEFRVYSSANNCTFEYVSQPFLMDLEGKQGNFKNLREFVFKNIDGYFKIYSKHTPINLVRDLPQGFSALEPLVDLPIGINITRFQTLLALHRSYLTPGDSSSGWTAGAAAYYVGYLQPRTFLLKYNENGTITDAVDCALDPLSETKCTLKSFTVEKGIYQTSNFRVQPTESIVRFPNITNLCPFGEVFNATRFASVYAWNRKRISNCVADYSVLYNSASFSTFKCYGVSPTKLNDLCFTNVYADSFVIRGDEVRQIAPGQTGKIADYNYKLPDDFTGCVIAWNSNNLDSKVGGNYNYLYRLFRKSNLKPFERDISTEIYQAGSTPCNGVEGFNCYFPLQSYGFQPTNGVGYQPYRVVVLSFELLHAPATVCGPKKSTNLVKNKCVNFNFNGLTGTGVLTESNKKFLPFQQFGRDIADTTDAVRDPQTLEILDITPCSFGGVSVITPGTNTSNQVAVLYQDVNCTEVPVAIHADQLTPTWRVYSTGSNVFQTRAGCLIGAEHVNNSYECDIPIGAGICASYQGGGSGGGSSIIAYTMSLGAENSVACSNNSIAIPTNFTISVTTEILPVSMTKTSVDCTMYICGDSTECSNLLLQYGSFCTQLNRALTGIAVEQDKNTQEVFAQVKQIYKTPPIKDFGGFNFSQILPDPSKPSKRSPIEDLLFNKVTLADAGFIKQYGDCLGDIAARDLICAQKFNGLTVLPPLLTDEMIAQYTSALLAGTICSGWTFGAGPALQIPFPMQMAYRFNGIGVTQNVLYENQKLIANQFNSAIGKIQDSLSSTPSALGKLQDVVNQNAQALNTLVKQLSSNFGAISSVLNDILSRLDKPEAEVQIDRLITGRLQSLQTYVTQQLIRAAEIRASANLAATKMSECVLGQSKRVDFCGKGYHLMSFPQSAPHGVVFLHVTYVPAQEKNFTTAPAICHDGKAHFPREGVFVSNGTHWFVTQRNFYEPQIITTDNTFVSGNCDVVIGIVNNTVYDPLQSELDSIKEELDKIHKNGSGGSGDIIKLLNEQVNKEMQSSNLYMSMSSWCYTHSLDGAGLFLFDHAAEEYEHAKKLIIFLNENNVPVQLTSISAPEHKFEGLTQIFQKAYEHEQHISESINNIVDHAIKSKDHATFNFLQWYVAEQHEEEVLFKDILDKIELIGNENHGLYLADQYVKGIAKSRKSGS

SEQ ID NO: 65 - protein, 1317 aa, synthetic construct
SSQCVNLTTRTQLPPAYTNSFTRGVYYPDKVFRSSVLHSTQDLFLPFFSNVTWFHAIHVSGTNGTKRFDNPVLPFNDGVYFASTEKSNIIRGWIFGTTLDSKTQSLLIVNNATNVVIKVCEFQFCNDPFLGVYYHKNNKSWMESEFRVYSSANNCTFEYVSQPFLMDLEGKQGNFKNLREFVFKNIDGYFKIYSKHTPINLVRDLPQGFSALEPLVDLPIGINITRFQTLLALHRSYLTPGDSSSGWTAGAAAYYVGYLQPRTFLLKYNENGTITDAVDCALDPLSETKCTLKSFTVEKGIYQTSNFRVQPTESIVRFPNITNLCPFGEVFNATKFPSVYAWERKKISNCVADYSVLYNSTFFSTFKCYGVSATKLNDLCFSNVYADSFVVKGDDVRQIAPGQTGVIADYNYKLPDDFMGCVLAWNTRNIDATSTGNYNYKYRYLRHGKLRPFERDISNVPFSPDGKPCTPPALNCYWPLNDYGFYTTTGIGYQPYRVVVLSFELLNAPATVCGPKKSTNLVKNKCVNFNFNGLTGTGVLTESNKKFLPFQQFGRDIADTTDAVRDPQTLEILDITPCSFGGVSVITPGTNTSNQVAVLYQDVNCTEVPVAIHADQLTPTWRVYSTGSNVFQTRAGCLIGAEHVNNSYECDIPIGAGICASYQTQTNSPGSASSVASQSIIAYTMSLGAENSVAYSNNSIAIPTNFTISVTTEILPVSMTKTSVDCTMYICGDSTECSNLLLQYGSFCTQLNRALTGIAVEQDKNTQEVFAQVKQIYKTPPIKDFGGFNFSQILPDPSKPSKRSFIEDLLFNKVTLADAGFIKQYGDCLGDIAARDLICAQKFNGLTVLPPLLTDEMIAQYTSALLAGTITSGWTFGAGAALQIPFAMQMAYRFNGIGVTQNVLYENQKLIANQFNSAIGKIQDSLSSTASALGKLQDVVNQNAQALNTLVKQLSSNFGAISSVLNDILSRLDPPEAEVQIDRLITGRLQSLQTYVTQQLIRAAEIRASANLAATKMSECVLGQSKRVDFCGKGYHLMSFPQSAPHGVVFLHVTYVPAQEKNFTTAPAICHDGKAHFPREGVFVSNGTHWFVTQRNFYEPQIITTDNTFVSGNCDVVIGIVNNTVYDPLQSELDSIKEELDKIHKNGSGGSGDIIKLLNEQVNKEMQSSNLYMSMSSWCYTHSLDGAGLFLFDHAAEEYEHAKKLIIFLNENNVPVQLTSISAPEHKFEGLTQIFQKAYEHEQHISESINNIVDHAIKSKDHATFNFLQWYVAEQHEEEVLFKDILDKIELIGNENHGLYLADQYVKGIAKSRKSGS

SEQ ID NO: 66 - protein, 1538 aa, synthetic construct
HHHHHHHHGPLEVLFQGPNITNLCPFGEVFNATKFPSVYAWERKKISNCVADYSVLYNSTFFSTFKCYGVSATKLNDLCFSNVYADSFVVKGDDVRQIAPGQTGVIADYNYKLPDDFMGCVLAWNTRNIDATSTGNYNYKYRYLRHGKLRPFERDISNVPFSPDGKPCTPPALNCYWPLNDYGFYTTTGIGYQPYRVVVLSFELLNAPATVCGPGSGGSGSSQCVNLTTRTQLPPAYTNSFTRGVYYPDKVFRSSVLHSTQDLFLPFFSNVTWFHAIHVSGTNGTKRFDNPVLPFNDGVYFASTEKSNIIRGWIFGTTLDSKTQSLLIVNNATNVVIKVCEFQFCNDPFLGVYYHKNNKSWMESEFRVYSSANNCTFEYVSQPFLMDLEGKQGNFKNLREFVFKNIDGYFKIYSKHTPINLVRDLPQGFSALEPLVDLPIGINITRFQTLLALHRSYLTPGDSSSGWTAGAAAYYVGYLQPRTFLLKYNENGTITDAVDCALDPLSETKCTLKSFTVEKGIYQTSNFRVQPTESIVRFPNITNLCPFGEVFNATRFASVYAWNRKRISNCVADYSVLYNSASFSTFKCYGVSPTKLNDLCFTNVYADSFVIRGDEVRQIAPGQTGKIADYNYKLPDDFTGCVIAWNSNNLDSKVGGNYNYLYRLFRKSNLKPFERDISTEIYQAGSTPCNGVEGFNCYFPLQSYGFQPTNGVGYQPYRVVVLSFELLHAPATVCGPKKSTNLVKNKCVNFNFNGLTGTGVLTESNKKFLPFQQFGRDIADTTDAVRDPQTLEILDITPCSFGGVSVITPGTNTSNQVAVLYQDVNCTEVPVAIHADQLTPTWRVYSTGSNVFQTRAGCLIGAEHVNNSYECDIPIGAGICASYQTQTNSPGSASSVASQSIIAYTMSLGAENSVAYSNNSIAIPTNFTISVTTEILPVSMTKTSVDCTMYICGDSTECSNLLLQYGSFCTQLNRALTGIAVEQDKNTQEVFAQVKQIYKTPPIKDFGGFNFSQILPDPSKPSKRSFIEDLLFNKVTLADAGFIKQYGDCLGDIAARDLICAQKFNGLTVLPPLLTDEMIAQYTSALLAGTITSGWTFGAGAALQIPFAMQMAYRFNGIGVTQNVLYENQKLIANQFNSAIGKIQDSLSSTASALGKLQDVVNQNAQALNTLVKQLSSNFGAISSVLNDILSRLDPPEAEVQIDRLITGRLQSLQTYVTQQLIRAAEIRASANLAATKMSECVLGQSKRVDFCGKGYHLMSFPQSAPHGVVFLHVTYVPAQEKNFTTAPAICHDGKAHFPREGVFVSNGTHWFVTQRNFYEPQIITTDNTFVSGNCDVVIGIVNNTVYDPLQSELDSIKEELDKIHKNGSGGSGDIIKLLNEQVNKEMQSSNLYMSMSSWCYTHSLDGAGLFLFDHAAEEYEHAKKLIIFLNENNVPVQLTSISAPEHKFEGLTQIFQKAYEHEQHISESINNIVDHAIKSKDHATFNFLQWYVAEQHEEEVLFKDILDKIELIGNENHGLYLADQYVKGIAKSRKSGS

SEQ ID NO: 67 - protein, 598 aa, synthetic construct
HHHHHHHHGPLEVLFQGPNITNLCPFGEVFNATKFPSVYAWERKKISNCVADYSVLYNSTFFSTFKCYGVSATKLNDLCFSNVYADSFVVKGDDVRQIAPGQTGVIADYNYKLPDDFMGCVLAWNTRNIDATSTGNYNYKRRYLRHGKLRPFERDISNVPFSPDGKPCTPPALNCYWPLNDYGFYTTTGIGYQPYRVVVLSFENKSAPATVCGPGSGGSGNITNLCPFGEVFNATRFASVYAWNRKRISNCVADYSVLYNSASFSTFKCYGVSPTKLNDLCFTNVYADSFVIRGDEVRQIAPGQTGKIADYNYKLPDDFTGCVIAWNSNNLDSKVGGNYNYLRRLFRKSNLKPFERDISTEIYQAGSTPCNGVEGFNCYFPLQSYGFQPTNGVGYQPYRVVVLSFENKSAPATVCGPGSGGGGESQVRQQFSKDIEKLLNEQVNKEMQSSNLYMSMSSWCYTHSLDGAGLFLFDHAAEEYEHAKKLIIFLNENNVPVQLTSISAPEHKFEGLTQIFQKAYEHEQHISESINNIVDHAIKSKDHATFNFLQWYVAEQHEEEVLFKDILDKIELIGNENHGLYLADQYVKGIAKSRKSGS

SEQ ID NO: 68 - protein, 1076 aa, synthetic construct
HHHHHHHHGPLEVLFQGPNITNLCPFGEVFNATKFPSVYAWERKKISNCVADYSVLYNSTFFSTFKCYGVSATKLNDLCFSNVYADSFVVKGDDVRQIAPGQTGVIADYNYKLPDDFMGCVLAWNTRNIDATSTGNYNYKRRYLRHGKLRPFERDISNVPFSPDGKPCTPPALNCYWPLNDYGFYTTTGIGYQPYRVVVLSFENKSAPATVCGPGSGGSGSSQCVNLTTRTQLPPAYTNSFTRGVYYPDKVFRSSVLHSTQDLFLPFFSNVTWFHAIHVSGTNGTKRFDNPVLPFNDGVYFASTEKSNIIRGWIFGTTLDSKTQSLLIVNNATNVVIKVCEFQFCNDPFLGVYYHKNNKSWMESEFRVYSSANNCTFEYVSQPFLMDLEGKQGNFKNLREFVFKNIDGYFKIYSKHTPINLVRDLPQGFSALEPLVDLPIGINITRFQTLLALHRSYLTPGDSSSGWTAGAAAYYVGYLQPRTFLLKYNENGTITDAVDCALDPLSETKCTLKSFTVEKGIYQTSNFRVQPTESIVRFPNITNLCPFGEVFNATRFASVYAWNRKRISNCVADYSVLYNSASFSTFKCYGVSPTKLNDLCFTNVYADSFVIRGDEVRQIAPGQTGKIADYNYKLPDDFTGCVIAWNSNNLDSKVGGNYNYLYRLFRKSNLKPFERDISTEIYQAGSTPCNGVEGFNCYFPLQSYGFQPTNGVGYQPYRVVVLSFELLHAPATVCGPKKSTNLVKNKCVNFNFNGLTGTGVLTESNKKFLPFQQFGRDIADTTDAVRDPQTLEILDITPCSFGGVSVITPGTNTSNQVAVLYQDVNCTEVPVAIHADQLTPTWRVYSTGSNVFQTRAGCLIGAEHVNNSYECDIPIGAGICASYQTGGSQSIIAYTGSGGGGESQVRQQFSKDIEKLLNEQVNKEMQSSNLYMSMSSWCYTHSLDGAGLFLFDHAAEEYEHAKKLIIFLNENNVPVQLTSISAPEHKFEGLTQIFQKAYEHEQHISESINNIVDHAIKSKDHATFNFLQWYVAEQHEEEVLFKDILDKIELIGNENHGLYLADQYVKGIAKSRKSGS

SEQ ID NO: 69 - protein, 894 aa, synthetic construct
HHHHHHHHGPLEVLFQGPNITNLCPFGEVFNATKFPSVYAWERKKISNCVADYSVLYNSTFFSTFKCYGVSATKLNDLCFSNVYADSFVVKGDDVRQIAPGQTGVIADYNYKLPDDFMGCVLAWNTRNIDATSTGNYNYKRRYLRHGKLRPFERDISNVPFSPDGKPCTPPALNCYWPLNDYGFYTTTGIGYQPYRVVVLSFENKSAPATVCGPGSGGNITNLCPFGEVFNATRFASVYAWNRKRISNCVADYSVLYNSASFSTFKCYGVSPTKLNDLCFTNVYADSFVIRGDEVRQIAPGQTGKIADYNYKLPDDFTGCVIAWNSNNLDSKVGGNYNYLRRLFRKSNLKPFERDISTEIYQAGSTPCNGVEGFNCYFPLQSYGFQPTNGVGYQPYRVVVLSFENKSAPATVCGPGSGGSGSSQCVNLTTRTQLPPAYTNSFTRGVYYPDKVFRSSVLHSTQDLFLPFFSNVTWFHAIHVSGTNGTKRFDNPVLPFNDGVYFASTEKSNIIRGWIFGTTLDSKTQSLLIVNNATNVVIKVCEFQFCNDPFLGVYYHKNNKSWMESEFRVYSSANNCTFEYVSQPFLMDLEGKQGNFKNLREFVFKNIDGYFKIYSKHTPINLVRDLPQGFSALEPLVDLPIGINITRFQTLLALHRSYLTPGDSSSGWTAGAAAYYVGYLQPRTFLLKYNENGTITDAVDCALDPLSETKCTLGSGGGGESQVRQQFSKDIEKLLNEQVNKEMQSSNLYMSMSSWCYTHSLDGAGLFLFDHAAEEYEHAKKLIIFLNENNVPVQLTSISAPEHKFEGLTQIFQKAYEHEQHISESINNIVDHAIKSKDHATFNFLQWYVAEQHEEEVLFKDILDKIELIGNENHGLYLADQYVKGIAKSRKSGS

SEQ ID NO: 70 - protein, 1175 aa, synthetic construct
HHHHHHHHGPLEVLFQGPNITNLCPFGEVFNATKFPSVYAWERKKISNCVADYSVLYNSTFFSTFKCYGVSATKLNDLCFSNVYADSFVVKGDDVRQIAPGQTGVIADYNYKLPDDFMGCVLAWNTRNIDATSTGNYNYKRRYLRHGKLRPFERDISNVPFSPDGKPCTPPALNCYWPLNDYGFYTTTGIGYQPYRVVVLSFENKSAPATVCGPGSGGLDRCTTFDDVQAPNYTQHTSSMRGVYYPDEIFRSDTLYLTQDLFLPFYSNVTGFHTINHTFGNPVIPFKDGIYFAATEKSNVVRGWVFGSTMNNKSQSVIIINNSTNVVIRACNFELCDNPFFAVSKPMGTQTHTMIFDNAFNCTFEYISDAFSLDVSEKSGNFKHLREFVFKNKDGFLYVYKGYQPIDVVRDLPSGFNTLKPIFKLPLGINITNFRAILTAFSPAQDIWGTSAAAYFVGYLKPTTFMLKYDENGTITDAVDCSQNPLAELKCSVGSGGSGNITNLCPFGEVFNATRFASVYAWNRKRISNCVADYSVLYNSASFSTFKCYGVSPTKLNDLCFTNVYADSFVIRGDEVRQIAPGQTGKIADYNYKLPDDFTGCVIAWNSNNLDSKVGGNYNYLRRLFRKSNLKPFERDISTEIYQAGSTPCNGVEGFNCYFPLQSYGFQPTNGVGYQPYRVVVLSFENKSAPATVCGPGSGGSGSSQCVNLTTRTQLPPAYTNSFTRGVYYPDKVFRSSVLHSTQDLFLPFFSNVTWFHAIHVSGTNGTKRFDNPVLPFNDGVYFASTEKSNIIRGWIFGTTLDSKTQSLLIVNNATNVVIKVCEFQFCNDPFLGVYYHKNNKSWMESEFRVYSSANNCTFEYVSQPFLMDLEGKQGNFKNLREFVFKNIDGYFKIYSKHTPINLVRDLPQGFSALEPLVDLPIGINITRFQTLLALHRSYLTPGDSSSGWTAGAAAYYVGYLQPRTFLLKYNENGTITDAVDCALDPLSETKCTLGSGGGGESQVRQQFSKDIEKLLNEQVNKEMQSSNLYMSMSSWCYTHSLDGAGLFLFDHAAEEYEHAKKLIIFLNENNVPVQLTSISAPEHKFEGLTQIFQKAYEHEQHISESINNIVDHAIKSKDHATFNFLQWYVAEQHEEEVLFKDILDKIELIGNENHGLYLADQYVKGIAKSRKSGS

SEQ ID NO: 71 - protein, 902 aa, synthetic construct
HHHHHHHHGPLEVLFQGPNITNLCPFGEVFNATRFASVYAWNRKRISNCVADYSVLYNSASFSTFKCYGVSPTKLNDLCFTNVYADSFVIRGDEVRQIAPGQTGKIADYNYKLPDDFTGCVIAWNSNNLDSKVGGNYNYLRRLFRKSNLKPFERDISTEIYQAGSTPCNGVEGFNCYFPLQSYGFQPTNGVGYQPYRVVVLSFENKSAPATVCGPGSGGSGSSQCVNLTTRTQLPPAYTNSFTRGVYYPDKVFRSSVLHSTQDLFLPFFSNVTWFHAIHVGSGGSGNITNLCPFGEVFNATKFPSVYAWERKKISNCVADYSVLYNSTFFSTFKCYGVSATKLNDLCFSNVYADSFVVKGDDVRQIAPGQTGVIADYNYKLPDDFMGCVLAWNTRNIDATSTGNYNYKRRYLRHGKLRPFERDISNVPFSPDGKPCTPPALNCYWPLNDYGFYTTTGIGYQPYRVVVLSFENKSAPATVCGPGSGGSGSGTNGTKRFDNPVLPFNDGVYFASTEKSNIIRGWIFGTTLDSKTQSLLIVNNATNVVIKVCEFQFCNDPFLGVYYHKNNKSWMESEFRVYSSANNCTFEYVSQPFLMDLEGKQGNFKNLREFVFKNIDGYFKIYSKHTPINLVRDLPQGFSALEPLVDLPIGINITRFQTLLALHRSYLTPGDSSSGWTAGAAAYYVGYLQPRTFLLKYNENGTITDAVDCALDPLSETKCTLGSGGGGESQVRQQFSKDIEKLLNEQVNKEMQSSNLYMSMSSWCYTHSLDGAGLFLFDHAAEEYEHAKKLIIFLNENNVPVQLTSISAPEHKFEGLTQIFQKAYEHEQHISESINNIVDHAIKSKDHATFNFLQWYVAEQHEEEVLFKDILDKIELIGNENHGLYLADQYVKGIAKSRKSGS

SEQ ID NO: 72 - protein, 902 aa, synthetic construct
HHHHHHHHGPLEVLFQGPNITNLCPFGEVFNATRFASVYAWNRKRISNCVADYSVLYNSASFSTFKCYGVSPTKLNDLCFTNVYADSFVIRGDEVRQIAPGQTGKIADYNYKLPDDFTGCVIAWNSNNLDSKVGGNYNYLRRLFRKSNLKPFERDISTEIYQAGSTPCNGVEGFNCYFPLQSYGFQPTNGVGYQPYRVVVLSFENKSAPATVCGPGSGGSGSSQCVNLTTRTQLPPAYTNSFTRGVYYPDKVFRSSVLHSTQDLFLPFFSNVTWFHAIHVSGTNGTKRFDNPVLPFNDGVYFASTEKSNIIRGWIFGTTLDSKTQSLLIVNNATNVVIKVCEFQFCNDPFLGVYYHKNGSGGSGNITNLCPFGEVFNATKFPSVYAWERKKISNCVADYSVLYNSTFFSTFKCYGVSATKLNDLCFSNVYADSFVVKGDDVRQIAPGQTGVIADYNYKLPDDFMGCVLAWNTRNIDATSTGNYNYKRRYLRHGKLRPFERDISNVPFSPDGKPCTPPALNCYWPLNDYGFYTTTGIGYQPYRVVVLSFENKSAPATVCGPGSGGSGNKSWMESEFRVYSSANNCTFEYVSQPFLMDLEGKQGNFKNLREFVFKNIDGYFKIYSKHTPINLVRDLPQGFSALEPLVDLPIGINITRFQTLLALHRSYLTPGDSSSGWTAGAAAYYVGYLQPRTFLLKYNENGTITDAVDCALDPLSETKCTLGSGGGGESQVRQQFSKDIEKLLNEQVNKEMQSSNLYMSMSSWCYTHSLDGAGLFLFDHAAEEYEHAKKLIIFLNENNVPVQLTSISAPEHKFEGLTQIFQKAYEHEQHISESINNIVDHAIKSKDHATFNFLQWYVAEQHEEEVLFKDILDKIELIGNENHGLYLADQYVKGIAKSRKSGS

SEQ ID NO: 73 - protein, 902 aa, synthetic construct
HHHHHHHHGPLEVLFQGPNITNLCPFGEVFNATRFASVYAWNRKRISNCVADYSVLYNSASFSTFKCYGVSPTKLNDLCFTNVYADSFVIRGDEVRQIAPGQTGKIADYNYKLPDDFTGCVIAWNSNNLDSKVGGNYNYLRRLFRKSNLKPFERDISTEIYQAGSTPCNGVEGFNCYFPLQSYGFQPTNGVGYQPYRVVVLSFENKSAPATVCGPGSGGSGSSQCVNLTTRTQLPPAYTNSFTRGVYYPDKVFRSSVLHSTQDLFLPFFSNVTWFHAIHVSGTNGTKRFDNPVLPFNDGVYFASTEKSNIIRGWIFGTTLDSKTQSLLIVNNATNVVIKVCEFQFCNDPFLGVYYHKNNKSWMESEFRVYSSANGSGGSGNITNLCPFGEVFNATKFPSVYAWERKKISNCVADYSVLYNSTFFSTFKCYGVSATKLNDLCFSNVYADSFVVKGDDVRQIAPGQTGVIADYNYKLPDDFMGCVLAWNTRNIDATSTGNYNYKRRYLRHGKLRPFERDISNVPFSPDGKPCTPPALNCYWPLNDYGFYTTTGIGYQPYRVVVLSFENKSAPATVCGPGSGGSGNCTFEYVSQPFLMDLEGKQGNFKNLREFVFKNIDGYFKIYSKHTPINLVRDLPQGFSALEPLVDLPIGINITRFQTLLALHRSYLTPGDSSSGWTAGAAAYYVGYLQPRTFLLKYNENGTITDAVDCALDPLSETKCTLGSGGGGESQVRQQFSKDIEKLLNEQVNKEMQSSNLYMSMSSWCYTHSLDGAGLFLFDHAAEEYEHAKKLIIFLNENNVPVQLTSISAPEHKFEGLTQIFQKAYEHEQHISESINNIVDHAIKSKDHATFNFLQWYVAEQHEEEVLFKDILDKIELIGNENHGLYLADQYVKGIAKSRKSGS

SEQ ID NO: 74 - protein, 1702 aa, synthetic construct
HHHHHHHHGPLEVLFQGPNLPDCNIEEWLTAKSVPSPLNWERKTFSNCNFNLSSLLRFVQADSFSCNNIDASKVYGMCFGSISVDKFAIPNSRQVDLQLGNSGFLQSFNYKIDTTATSCQLYYSLPANNVTINNYNPSSWNRRYGFNDDTVFKPRPAGVLTNHDVVYSQQCFKVPNTFCPCKNNGSCVSSGKGTTNGSGTCPAGTNYRTCENTTWCACSCTPDPITASGPRKCPQKKSLVGVGEHCSGLGVDSDYCGNVSCLCSTDAFLGWSADSCLVNDRCNIFANIILNGINSGTTCSTGSGGSGYVDVGPDSVKSACIEVDIQQTFFDKTWPRPIDVSKADGIIYPQGRTYSNITITYQGLFPYQGDHGDMYVYSAGHATGTTPQKLFVANYSQDVKQFANGFVVRIGAAANSTGTVIISPSTSATIRKIYPAFMLGSSVGNFSDGKMGRFFNHTLVLLPDGCGTLLRAFYCILEPRSGNHCPAGNSYTSFATYHTPATDCSDGNYNRNASLNSFKEYFNLRNCTFMYTYNITEDEILEWFGITQTAQGVHLFSSRYVDLYGGNMFQFATLPVYDTIKYYSIIPHSIRSIQSDRKAWAAFYVYKLQPLTFLLDFSVDGYIRRAIDCGFNDLSQLHCSYESFDVESGVYSVSSFEAKPSGSVVEQAEGVECDFSPLLSGTPPQVYNFKRLVFTNCNYNLTKLLSLFSVNDFTCSQISPAAIASNCYSSLILDYFSYPLSMKSDLSVSSAGPISQFNYKQSFSNPTCLILATVPHNLTTITKPLKYSYINKCSRFLSDDRTEVPQLVNANQYSPCVSIVPSTVWEDGDYYRKQLSPLEGGGWLVASGSTVAMTEQLQMGFGITVQYGTDTNSVCPKLEFANDTKIASQLGNCVEYSLYGVSGRGVFQNCTAVGVRQQRFVYDAYQNLVGYYSDDGNYYCLRACVSVPVSVIYDKETKTHATLFGSVACEHISSTMSQYSRSTRSMLKRRDSTYGPLQTPVGCVLGLVNSSLFVEDCKLPLGQSLCALPDTPSTLTPASVGSVPGEMRLASIAFNHPIQVDQLNSSYFKLSIPTNFSFGVTQEYIQTTIQKVTVDCKQYVCNGFQKCEQLLREYGQFCSKINQALHGANLRQDDSVRNLFASVKSSQSSPIIPGFGGDFNLTLLEPVSISTGSRSARSAIEDLLFDKVTIADPGYMQGYDDCMQQGPASARDLICAQYVAGYKVLPPLMDVNMEAAYTSSLLGSIAGVGWTAGLSSFAAIPFAQSIFYRLNGVGITQQVLSENQKLIANKFNQALGAMQTGFTTTNEAFHKVQDAVNNNAQALSKLASELSNTFGAISASIGDIIQRLDPPEQDAQIDRLINGRLTTLNAFVAQQLVRSESAALSAQLAKDKVNECVKAQSKRSGFCGQGTHIVSFVVNAPNGLYFMHVGYYPSNHIEVVSAYGLCDAANPTNCIAPVNGYFIKTNNTRIVDEWSYTGSSFYAPEPITSLNTKYVAPQVTYQNISTNLPPPLLGNSTGIDFQDELDEIHKQGSGGSGDIIKLLNEQVNKEMQSSNLYMSMSSWCYTHSLDGAGLFLFDHAAEEYEHAKKLIIFLNENNVPVQLTSISAPEHKFEGLTQIFQKAYEHEQHISESINNIVDHAIKSKDHATFNFLQWYVAEQHEEEVLFKDILDKIELIGNENHGLYLADQYVKGIAKSRKSGS

SEQ ID NO: 75 - protein, 1625 aa, synthetic construct
HHHHHHHHGPLEVLFQGPNLPDCNIEEWLTAKSVPSPLNWERKTFSNCNFNLSSLLRFVQADSFSCNNIDASKVYGMCFGSISVDKFAIPNSRQVDLQLGNSGFLQSFNYKIDTTATSCQLYYSLPANNVTINNYNPSSWNRRYGFNDDTVFKPRPAGVLTNHDVVYSQQCFKVPNTFCPCKNNGSCVSSGKGTTNGSGTCPAGTNYRTCENTTWCACSCTPDPITASGPRKCPQKKSLVGVGEHCSGLGVDSDYCGNVSCLCSTDAFLGWSADSCLVNDRCNIFANIILNGINSGTTCSTGSGGSGSSQCVNLTTRTQLPPAYTNSFTRGVYYPDKVFRSSVLHSTQDLFLPFFSNVTWFHAIHVSGTNGTKRFDNPVLPFNDGVYFASTEKSNIIRGWIFGTTLDSKTQSLLIVNNATNVVIKVCEFQFCNDPFLGVYYHKNNKSWMESEFRVYSSANNCTFEYVSQPFLMDLEGKQGNFKNLREFVFKNIDGYFKIYSKHTPINLVRDLPQGFSALEPLVDLPIGINITRFQTLLALHRSYLTPGDSSSGWTAGAAAYYVGYLQPRTFLLKYNENGTITDAVDCALDPLSETKCTLKSFTVEKGIYQTSNFRVQPTESIVRFPNITNLCPFGEVFNATRFASVYAWNRKRISNCVADYSVLYNSASFSTFKCYGVSPTKLNDLCFTNVYADSFVIRGDEVRQIAPGQTGKIADYNYKLPDDFTGCVIAWNSNNLDSKVGGNYNYLYRLFRKSNLKPFERDISTEIYQAGSTPCNGVEGFNCYFPLQSYGFQPTNGVGYQPYRVVVLSFELLHAPATVCGPKKSTNLVKNKCVNFNFNGLTGTGVLTESNKKFLPFQQFGRDIADTTDAVRDPQTLEILDITPCSFGGVSVITPGTNTSNQVAVLYQDVNCTEVPVAIHADQLTPTWRVYSTGSNVFQTRAGCLIGAEHVNNSYECDIPIGAGICASYQTQTNSPGSASSVASQSIIAYTMSLGAENSVAYSNNSIAIPTNFTISVTTEILPVSMTKTSVDCTMYICGDSTECSNLLLQYGSFCTQLNRALTGIAVEQDKNTQEVFAQVKQIYKTPPIKDFGGFNFSQILPDPSKPSKRSFIEDLLFNKVTLADAGFIKQYGDCLGDIAARDLICAQKFNGLTVLPPLLTDEMIAQYTSALLAGTITSGWTFGAGAALQIPFAMQMAYRFNGIGVTQNVLYENQKLIANQFNSAIGKIQDSLSSTASALGKLQDVVNQNAQALNTLVKQLSSNFGAISSVLNDILSRLDPPEAEVQIDRLITGRLQSLQTYVTQQLIRAAEIRASANLAATKMSECVLGQSKRVDFCGKGYHLMSFPQSAPHGVVFLHVTYVPAQEKNFTTAPAICHDGKAHFPREGVFVSNGTHWFVTQRNFYEPQIITTDNTFVSGNCDVVIGIVNNTVYDPLQSELDSIKEELDKIHKNGSGGSGDIIKLLNEQVNKEMQSSNLYMSMSSWCYTHSLDGAGLFLFDHAAEEYEHAKKLIIFLNENNVPVQLTSISAPEHKFEGLTQIFQKAYEHEQHISESINNIVDHAIKSKDHATFNFLQWYVAEQHEEEVLFKDILDKIELIGNENHGLYLADQYVKGIAKSRKSGS

SEQ ID NO: 76 - protein, 1637 aa, synthetic construct
HHHHHHHHGPLEVLFQGPNLPDCNIEEWLTAKSVPSPLNWERKTFSNCNFNLSSLLRFVQADSFSCNNIDASKVYGMCFGSISVDKFAIPNSRQVDLQLGNSGFLQSFNYKIDTTATSCQLYYSLPANNVTINNYNPSSWNRRYGFNDDTVFKPRPAGVLTNHDVVYSQQCFKVPNTFCPCKNNGSCVSSGKGTTNGSGTCPAGTNYRTCENTTWCACSCTPDPITASGPRKCPQKKSLVGVGEHCSGLGVDSDYCGNVSCLCSTDAFLGWSADSCLVNDRCNIFANIILNGINSGTTCSTGSGGSGSSQCVNLTTRTQLPPAYTNSFTRGVYYPDKVFRSSVLHSTQDLFLPFFSNVTWFHAIHVSGTNGTKRFDNPVLPFNDGVYFASTEKSNIIRGWIFGTTLDSKTQSLLIVNNATNVVIKVCEFQFCNDPFLGVYYHKNNKSWMESEFRVYSSANNCTFEYVSQPFLMDLEGKQGNFKNLREFVFKNIDGYFKIYSKHTPINLVRDLPQGFSALEPLVDLPIGINITRFQTLLALHRSYLTPGDSSSGWTAGAAAYYVGYLQPRTFLLKYNENGTITDAVDCALDPLSETKCTLKSFTVEKGIYQTSNFRVQPTESIVRFPQGVECDFSKLFKAAAPQIYNFSRLVFTNCNYNLTKLLSLFQVDEFSCHQISPSALASGCYSSLTVDYFAYPLSMKSYLQIGSAGEISQFNYKQDFSNPTCRILASVPANVSITKPDKYIYISQCYSLSAYSDVDVPHYVNPGQYTSIPCLYLTSSGFDEDGQYFRYNLTQFEGQNYLVATGVTVSMTDNLQMVFVITVQYGTDTNSVCPKKSTNLVKNKCVNFNFNGLTGTGVLTESNKKFLPFQQFGRDIADTTDAVRDPQTLEILDITPCSFGGVSVITPGTNTSNQVAVLYQDVNCTEVPVAIHADQLTPTWRVYSTGSNVFQTRAGCLIGAEHVNNSYECDIPIGAGICASYQTQTNSPGSASSVASQSIIAYTMSLGAENSVAYSNNSIAIPTNFTISVTTEILPVSMTKTSVDCTMYICGDSTECSNLLLQYGSFCTQLNRALTGIAVEQDKNTQEVFAQVKQIYKTPPIKDFGGFNFSQILPDPSKPSKRSFIEDLLFNKVTLADAGFIKQYGDCLGDIAARDLICAQKFNGLTVLPPLLTDEMIAQYTSALLAGTITSGWTFGAGAALQIPFAMQMAYRFNGIGVTQNVLYENQKLIANQFNSAIGKIQDSLSSTASALGKLQDVVNQNAQALNTLVKQLSSNFGAISSVLNDILSRLDPPEAEVQIDRLITGRLQSLQTYVTQQLIRAAEIRASANLAATKMSECVLGQSKRVDFCGKGYHLMSFPQSAPHGVVFLHVTYVPAQEKNFTTAPAICHDGKAHFPREGVFVSNGTHWFVTQRNFYEPQIITTDNTFVSGNCDVVIGIVNNTVYDPLQSELDSIKEELDKIHKNGSGGSGDIIKLLNEQVNKEMQSSNLYMSMSSWCYTHSLDGAGLFLFDHAAEEYEHAKKLIIFLNENNVPVQLTSISAPEHKFEGLTQIFQKAYEHEQHISESINNIVDHAIKSKDHATFNFLQWYVAEQHEEEVLFKDILDKIELIGNENHGLYLADQYVKGIAKSRKSGS

SEQ ID NO: 77 - protein, 1538 aa, synthetic construct
HHHHHHHHGPLEVLFQGPNITNLCPFGEVFNATKFPSVYAWERKKISNCVADYSVLYNSTFFSTFKCYGVSATKLNDLCFSNVYADSFVVKGDDVRQIAPGQTGVIADYNYKLPDDFMGCVLAWNTRNIDATSTGNYNYKRRYLRHGKLRPFERDISNVPFSPDGKPCTPPALNCYWPLNDYGFYTTTGIGYQPYRVVVLSFENKSAPATVCGPGSGGSGSSQCVNLTTRTQLPPAYTNSFTRGVYYPDKVFRSSVLHSTQDLFLPFFSNVTWFHAIHVSGTNGTKRFDNPVLPFNDGVYFASTEKSNIIRGWIFGTTLDSKTQSLLIVNNATNVVIKVCEFQFCNDPFLGVYYHKNNKSWMESEFRVYSSANNCTFEYVSQPFLMDLEGKQGNFKNLREFVFKNIDGYFKIYSKHTPINLVRDLPQGFSALEPLVDLPIGINITRFQTLLALHRSYLTPGDSSSGWTAGAAAYYVGYLQPRTFLLKYNENGTITDAVDCALDPLSETKCTLKSFTVEKGIYQTSNFRVQPTESIVRFPNITNLCPFGEVFNATRFASVYAWNRKRISNCVADYSVLYNSASFSTFKCYGVSPTKLNDLCFTNVYADSFVIRGDEVRQIAPGQTGKIADYNYKLPDDFTGCVIAWNSNNLDSKVGGNYNYLYRLFRKSNLKPFERDISTEIYQAGSTPCNGVEGFNCYFPLQSYGFQPTNGVGYQPYRVVVLSFELLHAPATVCGPKKSTNLVKNKCVNFNFNGLTGTGVLTESNKKFLPFQQFGRDIADTTDAVRDPQTLEILDITPCSFGGVSVITPGTNTSNQVAVLYQDVNCTEVPVAIHADQLTPTWRVYSTGSNVFQTRAGCLIGAEHVNNSYECDIPIGAGICASYQTQTNSPGSASSVASQSIIAYTMSLGAENSVAYSNNSIAIPTNFTISVTTEILPVSMTKTSVDCTMYICGDSTECSNLLLQYGSFCTQLNRALTGIAVEQDKNTQEVFAQVKQIYKTPPIKDFGGFNFSQILPDPSKPSKRSPIEDLLFNKVTLADAGFIKQYGDCLGDIAARDLICAQKFNGLTVLPPLLTDEMIAQYTSALLAGTITSGWTFGAGPALQIPFPMQMAYRFNGIGVTQNVLYENQKLIANQFNSAIGKIQDSLSSTPSALGKLQDVVNQNAQALNTLVKQLSSNFGAISSVLNDILSRLDPPEAEVQIDRLITGRLQSLQTYVTQQLIRAAEIRASANLAATKMSECVLGQSKRVDFCGKGYHLMSFPQSAPHGVVFLHVTYVPAQEKNFTTAPAICHDGKAHFPREGVFVSNGTHWFVTQRNFYEPQIITTDNTFVSGNCDVVIGIVNNTVYDPLQSELDSIKEELDKIHKNGSGGSGDIIKLLNEQVNKEMQSSNLYMSMSSWCYTHSLDGAGLFLFDHAAEEYEHAKKLIIFLNENNVPVQLTSISAPEHKFEGLTQIFQKAYEHEQHISESINNIVDHAIKSKDHATFNFLQWYVAEQHEEEVLFKDILDKIELIGNENHGLYLADQYVKGIAKSRKSGS

SEQ ID NO: 78 - protein, 1538 aa, synthetic construct
HHHHHHHHGPLEVLFQGPNITNLCPFGEVFNATKFPSVYAWERKKISNCVADYSVLYNSTFFSTFKCYGVSATKLNDLCFSNVYADSFVVKGDDVRQIAPGQTGVIADYNYKLPDDFMGCVLAWNTRNIDATSTGNYNYKRRYLRHGKLRPFERDISNVPFSPDGKPCTPPALNCYWPLNDYGFYTTTGIGYQPYRVVVLSFENKSAPATVCGPGSGGSGSSQCVNLTTRTQLPPAYTNSFTRGVYYPDKVFRSSVLHSTQDLFLPFFSNVTWFHAIHVSGTNGTKRFDNPVLPFNDGVYFASTEKSNIIRGWIFGTTLDSKTQSLLIVNNATNVVIKVCEFQFCNDPFLGVYYHKNNKSWMESEFRVYSSANNCTFEYVSQPFLMDLEGKQGNFKNLREFVFKNIDGYFKIYSKHTPINLVRDLPQGFSALEPLVDLPIGINITRFQTLLALHRSYLTPGDSSSGWTAGAAAYYVGYLQPRTFLLKYNENGTITDAVDCALDPLSETKCTLKSFTVEKGIYQTSNFRVQPTESIVRFPNITNLCPFGEVFNATRFASVYAWNRKRISNCVADYSVLYNSASFSTFKCYGVSPTKLNDLCFTNVYADSFVIRGDEVRQIAPGQTGKIADYNYKLPDDFTGCVIAWNSNNLDSKVGGNYNYLYRLFRKSNLKPFERDISTEIYQAGSTPCNGVEGFNCYFPLQSYGFQPTNGVGYQPYRVVVLSFELLHAPATVCGPKKSTNLVKNKCVNFNFNGLTGTGVLTESNKKFLPFQQFGRDIADTTDAVRDPQTLEILDITPCSFGGVSVITPGTNTSNQVAVLYQDVNCTEVPVAIHADQLTPTWRVYSTGSNVFQTRAGCLIGAEHVNNSYECDIPIGAGICASYQTQTNSPGSASSVASQSIIAYTMSLGAENSVAYSNNSIAIPTNFTISVTTEILPVSMTKTSVDCTMYICGDSTECSNLLLQYGSFCTQLNRALTGIAVEQDKNTQEVFAQVKQIYKTPPIKDFGGFNFSQILPDPSKPSKRSFIEDLLFNKVTLADAGFIKQYGDCLGDIAARDLICAQKFNGLTVLPPLLTDEMIAQYTSALLAGTITSGWTFGAGAALQIPFAMQMAYRFNGIGVTQNVLYENQKLIANQFNSAIGKIQDSLSSTASALGKLQDVVNQNAQALNTLVKQLSSNFGAISSVLNDILSRLDPPEAEVQIDRLITGRLQSLQTYVTQQLIRAAEIRASANLAATKMSECVLGQSKRVDFCGKGYHLMSFPQSAPHGVVFLHVTYVPAQEKNFTTAPAICHDGKAHFPREGVFVSNGTHWFVTQRNFYEPQIITTDNTFVSGNCDVVIGIVNNTVYDPLQSELDSIKEELDKIHKNGSGGSGDIIKLLNEQVNKEMQSSNLYMSMSSWCYTHSLDGAGLFLFDHAAEEYEHAKKLIIFLNENNVPVQLTSISAPEHKFEGLTQIFQKAYEHEQHISESINNIVDHAIKSKDHATFNFLQWYVAEQHEEEVLFKDILDKIELIGNENHGLYLADQYVKGIAKSRKSGS

SEQ ID NO: 79 - protein, 611 aa, synthetic construct
HHHHHHHHGPLEVLFQGPNITNLCPFGEVFNATRFASVYAWNRKRISNCVADYSVLYNSASFSTFKCYGVSPTKLNDLCFTNVYADSFVIRGDEVRQIAPGQTGKIADYNYKLPDDFTGCVIAWNSNNLDSKVGGNYNYLRRLFRKSNLKPFERDISTEIYQAGSTPCNGVEGFNCYFPLQSYGFQPTNGVGYQPYRVVVLSFENKSAPATVCGPGSGGSGEGVECDFSPLLSGTPPQVYNFKRLVFTNCNYNLTKLLSLFSVNDFTCSQISPAAIASNCYSSLILDYFSYPLSMKSDLSVSSAGPISQFNYKQSFSNPTCLILATVPHNLTTITKPLKYSYINKCSRLLSDDRTEVPQLVNANQYSPCVSIVPSTVWEDGDYYRKQLSPLEGGGWLVASGSTVAMTEQLQMGFGITVQNGTDTNSVCPKGSGGGGESQVRQQFSKDIEKLLNEQVNKEMQSSNLYMSMSSWCYTHSLDGAGLFLFDHAAEEYEHAKKLIIFLNENNVPVQLTSISAPEHKFEGLTQIFQKAYEHEQHISESINNIVDHAIKSKDHATFNFLQWYVAEQHEEEVLFKDILDKIELIGNENHGLYLADQYVKGIAKSRKSGS

SEQ ID NO: 80 - protein, 611 aa, synthetic construct
HHHHHHHHGPLEVLFQGPNITNLCPFGEVFNATRFASVYAWNRKRISNCVADYSVLYNSASFSTFKCYGVSPTKLNDLCFTNVYADSFVIRGDEVRQIAPGQTGKIADYNYKLPDDFTGCVIAWNSNNLDSKVGGNYNYLYRLFRKSNLKPFERDISTEIYQAGSTPCNGVEGFNCYAPLQSYGFQPTNGVGYQPYRVVVLSFENKSAPATVCGPGSGGSGEGVECDFSPLLSGTPPQVYNFKRLVFTNCNYNLTKLLSLFSVNDFTCSQISPAAIASNCYSSLILDYFSYPLSMKSDLSVSSAGPISQFNYKQSFSNPTCLILATVPHNLTTITKPLKYSYINKCSRLLSDDRTEVPQLVNANQYSPCVSIVPSTVWEDGDYYRKQLSPLEGGGWLVASGSTVAMTEQLQMGFGITVQNGTDTNSVCPKGSGGGGESQVRQQFSKDIEKLLNEQVNKEMQSSNLYMSMSSWCYTHSLDGAGLFLFDHAAEEYEHAKKLIIFLNENNVPVQLTSISAPEHKFEGLTQIFQKAYEHEQHISESINNIVDHAIKSKDHATFNFLQWYVAEQHEEEVLFKDILDKIELIGNENHGLYLADQYVKGIAKSRKSGS

SEQ ID NO: 81 - protein, 611 aa, synthetic construct
HHHHHHHHGPLEVLFQGPEGVECDFSPLLSGTPPQVYNFKRLVFTNCNYNLTKLLSLFSVNDFTCSQISPAAIASNCYSSLILDYFSYPLSMKSDLSVSSAGPISQFNYKQSFSNPTCLILATVPHNLTTITKPLKYSYINKCSRLLSDDRTEVPQLVNANQYSPCVSIVPSTVWEDGDYYRKQLSPLEGGGWLVASGSTVAMTEQLQMGFGITVQNGTDTNSVCPKGSGGSGNITNLCPFGEVFNATRFASVYAWNRKRISNCVADYSVLYNSASFSTFKCYGVSPTKLNDLCFTNVYADSFVIRGDEVRQIAPGQTGKIADYNYKLPDDFTGCVIAWNSNNLDSKVGGNYNYLRRLFRKSNLKPFERDISTEIYQAGSTPCNGVEGFNCYFPLQSYGFQPTNGVGYQPYRVVVLSFENKSAPATVCGPGSGGGGESQVRQQFSKDIEKLLNEQVNKEMQSSNLYMSMSSWCYTHSLDGAGLFLFDHAAEEYEHAKKLIIFLNENNVPVQLTSISAPEHKFEGLTQIFQKAYEHEQHISESINNIVDHAIKSKDHATFNFLQWYVAEQHEEEVLFKDILDKIELIGNENHGLYLADQYVKGIAKSRKSGS

SEQ ID NO: 82 - protein, 611 aa, synthetic construct
HHHHHHHHGPLEVLFQGPEGVECDFSPLLSGTPPQVYNFKRLVFTNCNYNLTKLLSLFSVNDFTCSQISPAAIASNCYSSLILDYFSYPLSMKSDLSVSSAGPISQFNYKQSFSNPTCLILATVPHNLTTITKPLKYSYINKCSRLLSDDRTEVPQLVNANQYSPCVSIVPSTVWEDGDYYRKQLSPLEGGGWLVASGSTVAMTEQLQMGFGITVQNGTDTNSVCPKGSGGSGNITNLCPFGEVFNATRFASVYAWNRKRISNCVADYSVLYNSASFSTFKCYGVSPTKLNDLCFTNVYADSFVIRGDEVRQIAPGQTGKIADYNYKLPDDFTGCVIAWNSNNLDSKVGGNYNYLYRLFRKSNLKPFERDISTEIYQAGSTPCNGVEGFNCYAPLQSYGFQPTNGVGYQPYRVVVLSFENKSAPATVCGPGSGGGGESQVRQQFSKDIEKLLNEQVNKEMQSSNLYMSMSSWCYTHSLDGAGLFLFDHAAEEYEHAKKLIIFLNENNVPVQLTSISAPEHKFEGLTQIFQKAYEHEQHISESINNIVDHAIKSKDHATFNFLQWYVAEQHEEEVLFKDILDKIELIGNENHGLYLADQYVKGIAKSRKSGS

SEQ ID NO: 83 - protein, 201 aa, synthetic construct
NITQLCPFNEVFNITSFPSVYAWERMRITNCVADYSVLYNSSASFSTFQCYGVSPTKLNDLCFSSVYADYFVVKGDDVRQIAPAQTGVIADYNYKLPDDFTGCVIAWNTNSLDSSNEFFYRRFRHGKIKPYGRDLSNVLFNPSGGTCSAEGLNCYKPLASYGFTQSSGIGFQPYRVVVLSFELLNAPATVCGPGSHHHHHH

SEQ ID NO: 84 - protein, 201 aa, synthetic construct
NITQLCPFNEVFNITSFPSVYAWERMRITNCVADYSVLYNSSASFSTFQCYGVSPTKLNDLCFSSVYADYFVVKGDDVRQIAPAQTGVIADYNYKLPDDFTGCVIAWNTNSLDSSNEFFYRRFRHGKIKPYGRDLSNVLFNPSGGTCSAEGLNCYKPLASYGFWQSSGIGFQPYRVVVLSFELLNAPATVCGPGSHHHHHH

SEQ ID NO: 85 - protein, 201 aa, synthetic construct
NITQLCPFNEVFNITSFPSVYAWERMRITNCVADYSVLYNSSASFSTFQCYGVSPTKLNDLCFSSVYADYFVVKGDDVRQIAPAQTGVIADYNYKLPDDFTGCVIAWNTNSLDSSNEFFYRRFRHGKIKPYGRDLSNVLFNPSGGTCSAEGLNCYKPLYSYGFWQSSGIGFQPYRVVVLSFELLNAPATVCGPGSHHHHHH

SEQ ID NO: 86 - protein, 204 aa, synthetic construct
NITNLCPFGEVFNATTFPSVYAWERKRISNCVADYSVLYNSTSFSTFKCYGVSATKLNDLCFSNVYADSFVVKGDDVRQIAPGQTGVIADYNYKLPDDFLGCVLAWNTNSKDSSTSGNYNYLYRWVRRSKLNPYERDLSNDIYSPGGQSCSAVGPNCYNPLRPYGFFTTAGVGHQPYRVVVLSFELLNAPATVCGPGSHHHHHH

SEQ ID NO: 87 - protein, 204 aa, synthetic construct
NITNLCPFGEVFNATTFPSVYAWERKRISNCVADYSVLYNSTSFSTFKCYGVSATKLNDLCFSNVYADSFVVKGDDVRQIAPGQTGVIADYNYKLPDDFTGCVLAWNTRNIDATQTGNYNYKYRSLRHGKLRPFERDISNVPFSPDGKPCTPPAFNCYWPLNDYGFYITNGIGYQPYRVVVLSFELLNAPATVCGPGSHHHHHH

SEQ ID NO: 88 - protein, 186 aa, synthetic construct
NITNVCPFHKVFNATRFPSVYAWERTKISDCIADYTVFYNSTSFSTFKCYGVSPSKLIDLCFTSVYADTFLIRFSEVRQVAPGQTGVIADYNYKLPDDFTGCVIAWNTAKQDTGHYFYRSHRSTKLKPFERDLSSDENGVRTLSTYDFNPNVPLEYQATRVVVLSFELLNAPATVCGPGSHHHHHH

SEQ ID NO: 89 - protein, 205 aa, synthetic construct
NITNLCPFGEVFNATTFASVYAWNRKRISNCVADYSVLYNSTSFSTFKCYGVSPTKLNDLCFTNVYADSFVVRGDEVRQIAPGQTGKIADYNYKLPDDFTGCVIAWNSNNLDSKVGGNYNYLYRLFRKSNLKPFERDISTEIYQAGSTPCNGVEGFNCYFPLQSYGFHPTNGVGYQPYRVVVLSFELLNAPATVCGPGSHHHHHH

SEQ ID NO: 90 - protein, 205 aa, synthetic construct
NITNLCPFGEVFNATTFASVYAWNRKRISNCVADYSVLYNSTSFSTFKCYGVSPTKLNDLCFTNVYADSFVITGDEVRQIAPGQTGKIADYNYKLPDDFTGCVIAWNSKHIDAKEGGNFNYLYRLFRKANLKPFERDISTEIYQAGSKPCNGQTGLNCYYPLYRYGFYPTDGVGHQPYRVVVLSFELLNAPATVCGPGSHHHHHH

SEQ ID NO: 91 - protein, 186 aa, synthetic construct
NITNFCPFDKVFNATRFPNVYAWQRTKISDCIADYTVLYNSTSFSTFKCYGVSPSKLIDLCFTSVYADTFLIRFSEVRQIAPGETGVIADYNYKLPDDFTGCVLAWNTAQQDIGSYFYRSHRAVKLKPFERDLSSDENGVRTLSTYDFNPNVPLDYQATRVVVLSFELLNAPATVCGPGSHHHHHH

SEQ ID NO: 92 - protein, 186 aa, synthetic construct
NITNFCPFDKVFNATRFPNVYAWQRTKISDCIADYTVLYNSTSFSTFKCYGVSPSKLIDLCFTSVYADTFLIRFSEVRQIAPGETGVIADYNYKLPDDFTGCVLAWNTAQQDIGSYFYRSHRAVKLKPFERDLSSDENGVRTLSTYDFWPNVPLDYQATRVVVLSFELLNAPATVCGPGSHHHHHH

SEQ ID NO: 93 - protein, 186 aa, synthetic construct
NITNFCPFDKVFNATRFPNVYAWQRTKISDCIADYTVLYNSTSFSTFKCYGVSPSKLIDLCFTSVYADTFLIRFSEVRQIAPGETGVIADYNYKLPDDFTGCVLAWNTAQQDIGSYFYRSHRAVKLKPFERDLSSDENGVRTLYTYDFWPNVPLDYQATRVVVLSFELLNAPATVCGPGSHHHHHH

SEQ ID NO: 94 - protein, 186 aa, synthetic construct
NITNLCPFDAVFNATRFPSVYAWERVKISNCVADYTAFYNSTSFSTFKCYGVSPSKLIDLCFTSVYADTFLIRFSEVRQVAPGETGVIADYNYKLPDDFTGCVIAWNTAKQDVGSYFYRSHRSSKLKPFERDLSSDENGVRTLSTYDFNPNVPLDYQATRVVVLSFELLNAPATVCGPGSHHHHHH

SEQ ID NO: 95 - protein, 186 aa, synthetic construct
NITNRCPFDKVFNATRFPSVYAWERTKISDCVADYTVLYNSTSFSTFKCYGVSPSKLIDLCFTSVYADTFLIRSSEVRQVAPGETGVIADYNYKLPDDFTGCVIAWNTANQDQGQYYYRSSRKEKLKPFERDLSSDENGVYTLSTYDFYPSVPLDYQATRVVVLSFELLNAPATVCGPGSHHHHHH

SEQ ID NO: 96 - protein, 186 aa, synthetic construct
NITNLCPFDKVFNATRFPSVYAWERTKISDCVADYTVFYNSTSFSTFNCYGVSPSKLIDLCFTSVYADTFLIRFSEVRQVAPGQTGVIADYNYKLPDDFTGCVIAWNTAKQDVGSYFYRSHRSSKLKPFERDLSSEENGVRTLSTYDFNQYVPLEYQATRVVVLSFELLNAPATVCGPGSHHHHHH

SEQ ID NO: 97 - protein, 186 aa, synthetic construct
NITNRCPFDKVFNATRFPNVYAWERTKISDCVADYTVLYNSTSFSTFKCYGVSPSKLIDLCFTSVYADTFLIRSSEVRQVAPGETGVIADYNYKLPDDFTGCVIAWNTAKQDQGQYYYRSHRKTKLKPFERDLSSDENGVRTLSTYDFYPSVPVAYQATRVVVLSFELLNAPATVCGPGSHHHHHH

SEQ ID NO: 98 - protein, 186 aa, synthetic construct
NITNRCPFDKVFNASRFPNVYAWERTKISDCVADYTVLYNSTSFSTFKCYGVSPSKLIDLCFTSVYADTFLIRSSEVRQVAPGETGVIADYNYKLPDDFTGCVIAWNTAKQDQGQYYYRSSRKTKLKPFERDLTSDENGVRTLSTYDFYPNVPIEYQATRVVVLSFELLNAPATVCGPGSHHHHHH

SEQ ID NO: 99 - protein, 201 aa, synthetic construct
NITNLCPFSQVFNATRFPSVYAWTRERISNCIADYSVLYNSTSFSTFRCYGVSPTKLNDLCFSNVYADSMVVRGDEVRQIAPSQTGVIADYNYKLPDDFTGCVIAWNSKAKDENGQYFYRLFRKSKLLPFQRDVSNVTYGSGKNDGCNPSEADCYWPLLKYGFTSSVSQDYQPYRVVVLSFELLNAPATVCGPGSHHHHHH

SEQ ID NO: 100 - protein, 201 aa, synthetic construct
NITNLCPFSQVFNATRFPSVYAWTRERISNCIADYSVLYNSTSFSTFRCYGVSPTKLNDLCFSNVYADSMVVRGDEVRQIAPSQTGVIADYNYKLPDDFTGCVIAWNSKAKDENGQYFYRLFRKSKLLPFQRDVSNVTYGSGKNDGCNPSEADCYWPLLKYGFWSSVSQDYQPYRVVVLSFELLNAPATVCGPGSHHHHHH

SEQ ID NO: 101 - protein, 201 aa, synthetic construct
NITNLCPFSQVFNATRFPSVYAWTRERISNCIADYSVLYNSTSFSTFRCYGVSPTKLNDLCFSNVYADSMVVRGDEVRQIAPSQTGVIADYNYKLPDDFTGCVIAWNSKAKDENGQYFYRLFRKSKLLPFQRDVSNVTYGSGKNDGCNPSEADCYWPLYKYGFWSSVSQDYQPYRVVVLSFELLNAPATVCGPGSHHHHHH

SEQ ID NO: 102 - protein, 202 aa, synthetic construct
NMTNICPFDQVFNKTQFPSVYAWERVRISDCVSDYTVLYNSSASFSTFKCYGVSPTKLNDLCFSGVYADYFVVKGDHVHQIAPGQTGVIADYNYKLPSEFVGCILAWNTRTIDSKRGFYYRLFRHGNIRPYERDTSNVPYNAAGGTCNQPGTHNCYEPLQDYGFTSTSGVGYQPFRVVVLSFELLNAPATVCGPGSHHHHHH

SEQ ID NO: 103 - protein, 202 aa, synthetic construct
NMTNICPFDQVFNKTQFPSVYAWERVRISDCVSDYTVLYNSSASFSTFKCYGVSPTKLNDLCFSGVYADYFVVKGDHVHQIAPGQTGVIADYNYKLPSEFVGCILAWNTRTIDSKRGFYYRLFRHGNIRPYERDTSNVPYNAAGGTCNQPGTHNCYEPLQDYGFWSTSGVGYQPFRVVVLSFELLNAPATVCGPGSHHHHHH

SEQ ID NO: 104 - protein, 202 aa, synthetic construct
NMTNICPFDQVFNKTQFPSVYAWERVRISDCVSDYTVLYNSSASFSTFKCYGVSPTKLNDLCFSGVYADYFVVKGDHVHQIAPGQTGVIADYNYKLPSEFVGCILAWNTRTIDSKRGFYYRLFRHGNIRPYERDTSNVPYNAAGGTCNQPGTHNCYEPLYDYGFWSTSGVGYQPFRVVVLSFELLNAPATVCGPGSHHHHHH

SEQ ID NO: 105 - protein, 204 aa, synthetic construct
NITNLCPFGQVFNASNFPSVYAWERLRISDCVADYAVLYNSSSSFSTFKCYGVSPTKLNDLCFSSVYADYFVVKGDDVRQIAPAQTGVIADYNYKLPDDFTGCVLAWNTNSVDSKSGNNFYYRLFRHGKIKPYERDISNVLYNSAGGTCSSISQLGCYEPLKSYGFTPTVGVGYQPYRVVVLSFELLNAPATVCGPGSHHHHHH

SEQ ID NO: 106 - protein, 204 aa, synthetic construct
NITNLCPFGQVFNASNFPSVYAWERLRISDCVADYAVLYNSSSSFSTFKCYGVSPTKLNDLCFSSVYADYFVVKGDDVRQIAPAQTGVIADYNYKLPDDFTGCVLAWNTNSVDSKSGNNFYYRLFRHGKIKPYERDISNVLYNSAGGTCSSISQLGCYEPLKSYGFWPTVGVGYQPYRVVVLSFELLNAPATVCGPGSHHHHHH

SEQ ID NO: 107 - protein, 204 aa, synthetic construct
NITNLCPFGQVFNASNFPSVYAWERLRISDCVADYAVLYNSSSSFSTFKCYGVSPTKLNDLCFSSVYADYFVVKGDDVRQIAPAQTGVIADYNYKLPDDFTGCVLAWNTNSVDSKSGNNFYYRLFRHGKIKPYERDISNVLYNSAGGTCSSISQLGCYEPLYSYGFWPTVGVGYQPYRVVVLSFELLNAPATVCGPGSHHHHHH

SEQ ID NO: 108 - protein, 201 aa, synthetic construct
NITNLCPFSQVFNATRFPSVYAWTRERISNCIADYSVLYNSTSFSTFRCYGVSPTKLNDLCFSNVYADSMVVRGDEVRQIAPSQTGVIADYNYKLPDDFTGCVIAWNSKAKDENGQYFYRLFRKSKLLPFQRDVSNVTYGSGKNDGCNPSEADCYWPLLKYGFTGSVSQDYQPYRVVVLSFELLNAPATVCGPGSHHHHHH

SEQ ID NO: 109 - protein, 187 aa, synthetic construct
NITNRCPFDKVFNATRFPNVYAWERTKISDCVADYTVLYNSTSFSTFKCYGVSPSKLIDLCFTSVYADTFLIRSSEVRQVAPGETGVIADYNYKLPDDFTGCVIAWNTAKHDTGNYYYRSHRKTKLKPFERDLSSDDGNGVYTLSTYDFNPNVPVAYQATRVVVLSFELLNAPATVCGPGSHHHHHH

SEQ ID NO: 110 - protein, 202 aa, synthetic construct
NVTQLCPFSDVFNRTMFPSVYAWERMSIRDCVADYAVLYNSSISFSTFECYGVSPTKLNDLCFSSVYADYFVVRGDDVKQIAPGKTGVIADYNYKLPDDFVGCVLAWNSRHVDNKQGFYYRLFRHGKIKPYQRDMSRELYSPSGTPCTVVGFNCYDPLAHYAFASPGIGIGYQPFRVVVLSFQLLNAPATVCGPGSHHHHHH

SEQ ID NO: 111 - protein, 204 aa, synthetic construct
NITNLCPFDEVFNATRFPSVYAWERKKISNCVADYSVLYNSTSFSTFKCYGVSPSKLNDLCFTSVYADSFVIRGDEVRQIAPGQTGVIADYNYKLPDDFTGCVIAWNTANQDSGEGGNPNYYYRSSRKSKLKPFERDLSSDEYNVGSQPCNRMGPNCYRTLSTYDFYPTVGVGYQPYRVVVLSFELLNAPATVCGPGSHHHHHH

SEQ ID NO: 112 - protein, 204 aa, synthetic construct
NITNLCPFDEVFNATRFPSVYAWEAKKISNCVADYSVLYNSTSFSTFKCYGVSPSKLNDLCFTSVYADSFVIRGDEVRQIAPGQTGVIADYNYKLPDDFTGCVIAWNTANQDSGEGGNPNYYYRSSRKSKLKPFERDLSSDEYNVGSQPCNRMGPNCYRTLSTYDFYPTVGVGYQPYRVVVLSFELLNAPATVCGPGSHHHHHH

SEQ ID NO: 113 - protein, 204 aa, synthetic construct
NITNLCPFDEVFNATRFPSVYAWERKKISNCVADYSVLYNSTSFSTFKCYGVSPSKLNDLCFTSVYADSFVIRGDEVRQIAPGQTGVIADYNYKLPDDFTGCVIAWNTANQDSGEGGNPNYYYRSSRKSKLAPFERDLSSDEYNVGSQPCNRMGPNCYRTLSTYDFYPTVGVGYQPYRVVVLSFELLNAPATVCGPGSHHHHHH

SEQ ID NO: 114 - protein, 204 aa, synthetic construct
NITNLCPFDEVFNATRFPSVYAWERKKISNCVADYSVLYNSTSFSTFKCYGVSPSKLNDLCFTSVYADSFVIRGDEVRQIAPGQTGVIADYNYKLPDDFTGCVIAWNTANQDSGEGGNPNYYYRSSRKSKLKPFEADLSSDEYNVGSQPCNRMGPNCYRTLSTYDFYPTVGVGYQPYRVVVLSFELLNAPATVCGPGSHHHHHH

SEQ ID NO: 115 - protein, 291 aa, synthetic construct
NLPDCNIEEWLTAKSVPSPLNWERKTFSNCNFNLSSLLRFVQADSFSCNNIDASKVYGMCFGSISVDKFAIPNSRQVDLQLGNSGFLQSFNYKIDTTATSCQLYYSLPANNVTINNYNPSSWNRRYGFNDDTVFKPRPAGVLTNHDVVYSQQCFKVPNTFCPCKNNGSCVSSGKGTTNGSGTCPAGTNYRTCENTTWCACSCTPDPITASGPRKCPQKKSLVGVGEHCSGLGVDSDYCGNVSCLCSTDAFLGWSADSCLVNDRCNIFANIILNGINSGTTCSTGSHHHHHH

SEQ ID NO: 116 - protein, 217 aa, synthetic construct
QGVECDFSKLFKAAAPQIYNFSRLVFTNCNYNLTKLLSLFQVDEFSCHQISPSALASGCYSSLTVDYFAYPLSMKSYLQIGSAGEISQFNYKQDFSNPTCRILASVPANVSITKPDKYIYISQCYSLSAYSDVDVPHYVNPGQYTSIPCLYLTSSGFDEDGQYFRYNLTQFEGQNYLVATGVTVSMTDNLQMVFVITVQYGTDTNSVCPGSHHHHHH

SEQ ID NO: 117 - protein, 1401 aa, synthetic construct
AVIGDLKCTSDNINDKDTGPPPISTDTVDVTNGLGTYYVLDRVYLNTTLFLNGYYPTSGSTYRNMALKGSVLLSRLWFKPPFLSDFINGIFAKVKNTKVIKDRVMYSEFPAITIGSTFVNTSYSVVVQPRTINSTQDGDNKLQGLLEVSVCQYNMCEYPQTICHPNLGNHRKELWHLDTGVVSCLYKRNFTYDVNADYLYFHFYQEGGTFYAYFTDTGVVTKFLFNVYLGMALSHYYVMPLTCNSKLTLEYWVTPLTSRQYLLAFNQDGIIFNAVDCMSDFMSEIKCKTQSIAPPTGVYELNGYTVQPIADVYRRKPNLPNCNIEAWLNDKSVPSPLNWERKTFSNCNFNMSSLMSFIQADSFTCNNIDAAKIYGMCFSSITIDKFAIPNGRKVDLQLGNLGYLQSFNYRIDTTATSCQLYYNLPAANVSVSRFNPSTWNKRFGFIEDSVFKPRPAGVLTNHDVVYAQHCFKAPKNFCPCKLNGSCVGSGPGKNNGIGTCPAGTNYLTCDNLCTPDPITFTGTYKCPQTKSLVGIGEHCSGLAVKSDYCGGNSCTCRPQAFLGWSADSCLQGDKCNIFANFILHDVNSGLTCSTDLQKANTDIILGVCVNYDLYGILGQGIFVEVNATYYNSWQNLLYDSNGNLYGFRDYITNRTFMIRSCYSGRVSAAFHANSSEPALLFRNIKCNYVFNNSLTRQLQPINYFDSYLGCVVNAYNSTAISVQTCDLTVGSGYCVDYSKNGGSGGAITTGYRFTNFEPFTVNSVNDSLEPVGGLYEIQIPSEFTIGNMVEFIQTSSPKVTIDCAAFVCGDYAACKSQLVEYGSFCDNINAILTEVNELLDTTQLQVANSLMNGVTLSTKLKDGVNFNVDDINFSPVLGCLGSECSKASSRSAIEDLLFDKVKLSDVGFVEAYNNCTGGAEIRDLICVQSYKGIKVLPPLLSENQFSGYTLAATSASLFPPWTAAAGVPFYLNVQYRINGLGVTMDVLSQNQKLIANAFNNALYAIQEGFDATNSALVKIQAVVNANAEALNNLLQQLSNRFGAISASLQEILSRLDPPEAEAQIDRLINGRLTALNAYVSQQLSDSTLVKFSAAQAMEKVNECVKSQSSRINFCGNGNHIISLVQNAPYGLYFIHFSYVPTKYVTARVSPGLCIAGDRGIAPKSGYFVNVNNTWMYTGSGYYYPEPITENNVVVMSTCAVNYTKAPYVMLNTSISELQDFKEELDQWHKQGSGGSGDIIKLLNEQVNKEMQSSNLYMSMSSWCYTHSLDGAGLFLFDHAAEEYEHAKKLIIFLNENNVPVQLTSISAPEHKFEGLTQIFQKAYEHEQHISESINNIVDHAIKSKDHATFNFLQWYVAEQHEEEVLFKDILDKIELIGNENHGLYLADQYVKGIAKSRKSGS

SEQ ID NO: 118 - protein, 1401 aa, synthetic construct
AVIGDLKCTSDNINDKDTGPPPISTDTVDVTNGLGTYYVLDRVYLNTTLFLNGYYPTSGSTYRNMALKGSVLLSRLWFKPPFLSDFINGIFAKVKNTKVIKDRVMYSEFPAITIGSTFVNTSYSVVVQPRTINSTQDGDNKLQGLLEVSVCQYNMCEYPQTICHPNLGNHRKELWHLDTGVVSCLYKRNFTYDVNADYLYFHFYQEGGTFYAYFTDTGVVTKFLFNVYLGMALSHYYVMPLTCNSKLTLEYWVTPLTSRQYLLAFNQDGIIFNAVDCMSDFMSEIKCKTQSIAPPTGVYELNGYTVQPIADVYRRKPNLPNCNIEAWLNDKSVPSPLNWERKTFSNCNFNMSSLMSFIQADSFTCNNIDAAKIYGMCFSSITIDKFAIPNGRKVDLQLGNLGYLQSFNYRIDTTATSCQLYYNLPAANVSVSRFNPSTWNKRFGFIEDSVFKPRPAGVLTNHDVVYAQHCFKAPKNFCPCKLNGSCVGSGPGKNNGIGTCPAGTNYLTCDNLCTPDPITFTGTYKCPQTKSLVGIGEHCSGLAVKSDYCGGNSCTCRPQAFLGWSADSCLQGDKCNIFANFILHDVNSGLTCSTDLQKANTDIILGVCVNYDLYGILGQGIFVEVNATYYNSWQNLLYDSNGNLYGFRDYITNRTFMIRSCYSGRVSAAFHANSSEPALLFRNIKCNYVFNNSLTRQLQPINYFDSYLGCVVNAYNSTAISVQTCDLTVGSGYCVDYSKNGGSGGAITTGYRFTNFEPFTVNSVNDSLEPVGGLYEIQIPSEFTIGNMVEFIQTSSPKVTIDCAAFVCGDYAACKSQLVEYGSFCDNINAILTEVNELLDTTQLQVANSLMNGVTLSTKLKDGVNFNVDDINFSPVLGCLGSECSKASSRSAIEDLLFDKVKLSDVGFVEAYNNCTGGAEIRDLICVQSYKGIKVLPPLLSENQFSGYTLAATSASLFPPWTAAAGVPFYLNVQYRINGLGVTMDVLSQNQKLIANAFNNALYAIQEGFDATNSALVKIQAVVNANAEALNNLLQQLSNRFGAISASLQEILSRLDPPEAEAQIDRLINGRLTALNAYVSQQLSDSTLVKFSAAQAMEKVNECVKSQSSRINFCGNGNHIISLVQNAPYGLYFIHFSYVPTKYVTARVSPGLCIAGDRGIAPKSGYFVNVNNTWMYTGSGYYYPEPITENNVVVMSTCAVNYTKAPYVMLNTLQSNLQDIKEELDQIHKNGSGGSGDIIKLLNEQVNKEMQSSNLYMSMSSWCYTHSLDGAGLFLFDHAAEEYEHAKKLIIFLNENNVPVQLTSISAPEHKFEGLTQIFQKAYEHEQHISESINNIVDHAIKSKDHATFNFLQWYVAEQHEEEVLFKDILDKIELIGNENHGLYLADQYVKGIAKSRKSGS

SEQ ID NO: 119 - protein, 1401 aa, synthetic construct
AVIGDLKCTSDNINDKDTGPPPISTDTVDVTNGLGTYYVLDRVYLNTTLFLNGYYPTSGSTYRNMALKGSVLLSRLWFKPPFLSDFINGIFAKVKNTKVIKDRVMYSEFPAITIGSTFVNTSYSVVVQPRTINSTQDGDNKLQGLLEVSVCQYNMCEYPQTICHPNLGNHRKELWHLDTGVVSCLYKRNFTYDVNADYLYFHFYQEGGTFYAYFTDTGVVTKFLFNVYLGMALSHYYVMPLTCNSKLTLEYWVTPLTSRQYLLAFNQDGIIFNAVDCMSDFMSEIKCKTQSIAPPTGVYELNGYTVQPIADVYRRKPNLPNCNIEAWLNDKSVPSPLNWERKTFSNCNFNMSSLMSFIQADSFTCNNIDAAKIYGMCFSSITIDKFAIPNGRKVDLQLGNLGYLQSFNYRIDTTATSCQLYYNLPAANVSVSRFNPSTWNKRFGFIEDSVFKPRPAGVLTNHDVVYAQHCFKAPKNFCPCKLNGSCVGSGPGKNNGIGTCPAGTNYLTCDNLCTPDPITFTGTYKCPQTKSLVGIGEHCSGLAVKSDYCGGNSCTCRPQAFLGWSADSCLQGDKCNIFANFILHDVNSGLTCSTDLQKANTDIILGVCVNYDLYGILGQGIFVEVNATYYNSWQNLLYDSNGNLYGFRDYITNRTFMIRSCYSGRVSAAFHANSSEPALLFRNIKCNYVFNNSLTRQLQPINYFDSYLGCVVNAYNSTAISVQTCDLTVGSGYCVDYSKNGGSGGAITTGYRFTNFEPFTVNSVNDSLEPVGGLYEIQIPSEFTIGNMVEFIQTSSPKVTIDCAAFVCGDYAACKSQLVEYGSFCDNINAILTEVNELLDTTQLQVANSLMNGVTLSTKLKDGVNFNVDDINFSPVLGCLGSECSKASSRSAIEDLLFDKVKLSDVGFVEAYNNCTGGAEIRDLICVQSYKGIKVLPPLLSENQFSGYTLAATSASLFPPWTAAAGVPFYLNVQYRINGLGVTMDVLSQNQKLIANAFNNALYAIQEGFDATNSALVKIQAVVNANAEALNNLLQQLSNRFGAISASLQEILSRLDPPEAEAQIDRLINGRLTALNAYVSQQLSDSTLVKFSAAQAMEKVNECVKSQSSRINFCGNGNHIISLVQNAPYGLYFIHFSYVPTKYVTARVSPGLCIAGDRGIAPKSGYFVNVNNTWMYTGSGYYYPEPITENNVVVMSTCAVNYTKAPYVMLNTLQSNLQDIKEELDQIHKQGSGGSGDIIKLLNEQVNKEMQSSNLYMSMSSWCYTHSLDGAGLFLFDHAAEEYEHAKKLIIFLNENNVPVQLTSISAPEHKFEGLTQIFQKAYEHEQHISESINNIVDHAIKSKDHATFNFLQWYVAEQHEEEVLFKDILDKIELIGNENHGLYLADQYVKGIAKSRKSGS

SEQ ID NO: 120 - protein, 1401 aa, synthetic construct
AVIGDLKCTSDNINDKDTGPPPISTDTVDVTNGLGTYYVLDRVYLNTTLFLNGYYPTSGSTYRNMALKGSVLLSRLWFKPPFLSDFINGIFAKVKNTKVIKDRVMYSEFPAITIGSTFVNTSYSVVVQPRTINSTQDGDNKLQGLLEVSVCQYNMCEYPQTICHPNLGNHRKELWHLDTGVVSCLYKRNFTYDVNADYLYFHFYQEGGTFYAYFTDTGVVTKFLFNVYLGMALSHYYVMPLTCNSKLTLEYWVTPLTSRQYLLAFNQDGIIFNAVDCMSDFMSEIKCKTQSIAPPTGVYELNGYTVQPIADVYRRKPNLPNCNIEAWLNDKSVPSPLNWERKTFSNCNFNMSSLMSFIQADSFTCNNIDAAKIYGMCFSSITIDKFAIPNGRKVDLQLGNLGYLQSFNYRIDTTATSCQLYYNLPAANVSVSRFNPSTWNKRFGFIEDSVFKPRPAGVLTNHDVVYAQHCFKAPKNFCPCKLNGSCVGSGPGKNNGIGTCPAGTNYLTCDNLCTPDPITFTGTYKCPQTKSLVGIGEHCSGLAVKSDYCGGNSCTCRPQAFLGWSADSCLQGDKCNIFANFILHDVNSGLTCSTDLQKANTDIILGVCVNYDLYGILGQGIFVEVNATYYNSWQNLLYDSNGNLYGFRDYITNRTFMIRSCYSGRVSAAFHANSSEPALLFRNIKCNYVFNNSLTRQLQPINYFDSYLGCVVNAYNSTAISVQTCDLTVGSGYCVDYSKNGGSGGAITTGYRFTNFEPFTVNSVNDSLEPVGGLYEIQIPSEFTIGNMVEFIQTSSPKVTIDCAAFVCGDYAACKSQLVEYGSFCDNINAILTEVNELLDTTQLQVANSLMNGVTLSTKLKDGVNFNVDDINFSPVLGCLGSECSKASSRSAIEDLLFDKVKLSDVGFVEAYNNCTGGAEIRDLICVQSYKGIKVLPPLLSENQFSGYTLAATSASLFPPWTAAAGVPFYLNVQYRINGLGVTMDVLSQNQKLIANAFNNALYAIQEGFDATNSALVKIQAVVNANAEALNNLLQQLSNRFGAISASLQEILSRLDPPEAEAQIDRLINGRLTALNAYVSQQLSDSTLVKFSAAQAMEKVNECVKSQSSRINFCGNGNHIISLVQNAPYGLYFIHFSYVPTKYVTARVSPGLCIAGDRGIAPKSGYFVNVNNTWMYTGSGYYYPEPITENNVVVMSTCAVNYTKAPYVMLNTLQSNLQDLKEELDQLHKNGSGGSGDIIKLLNEQVNKEMQSSNLYMSMSSWCYTHSLDGAGLFLFDHAAEEYEHAKKLIIFLNENNVPVQLTSISAPEHKFEGLTQIFQKAYEHEQHISESINNIVDHAIKSKDHATFNFLQWYVAEQHEEEVLFKDILDKIELIGNENHGLYLADQYVKGIAKSRKSGS

SEQ ID NO: 121 - protein, 1401 aa, synthetic construct
AVIGDLKCTSDNINDKDTGPPPISTDTVDVTNGLGTYYVLDRVYLNTTLFLNGYYPTSGSTYRNMALKGSVLLSRLWFKPPFLSDFINGIFAKVKNTKVIKDRVMYSEFPAITIGSTFVNTSYSVVVQPRTINSTQDGDNKLQGLLEVSVCQYNMCEYPQTICHPNLGNHRKELWHLDTGVVSCLYKRNFTYDVNADYLYFHFYQEGGTFYAYFTDTGVVTKFLFNVYLGMALSHYYVMPLTCNSKLTLEYWVTPLTSRQYLLAFNQDGIIFNAVDCMSDFMSEIKCKTQSIAPPTGVYELNGYTVQPIADVYRRKPNLPNCNIEAWLNDKSVPSPLNWERKTFSNCNFNMSSLMSFIQADSFTCNNIDAAKIYGMCFSSITIDKFAIPNGRKVDLQLGNLGYLQSFNYRIDTTATSCQLYYNLPAANVSVSRFNPSTWNKRFGFIEDSVFKPRPAGVLTNHDVVYAQHCFKAPKNFCPCKLNGSCVGSGPGKNNGIGTCPAGTNYLTCDNLCTPDPITFTGTYKCPQTKSLVGIGEHCSGLAVKSDYCGGNSCTCRPQAFLGWSADSCLQGDKCNIFANFILHDVNSGLTCSTDLQKANTDIILGVCVNYDLYGILGQGIFVEVNATYYNSWQNLLYDSNGNLYGFRDYITNRTFMIRSCYSGRVSAAFHANSSEPALLFRNIKCNYVFNNSLTRQLQPINYFDSYLGCVVNAYNSTAISVQTCDLTVGSGYCVDYSKNGGSGGAITTGYRFTNFEPFTVNSVNDSLEPVGGLYEIQIPSEFTIGNMVEFIQTSSPKVTIDCAAFVCGDYAACKSQLVEYGSFCDNINAILTEVNELLDTTQLQVANSLMNGVTLSTKLKDGVNFNVDDINFSPVLGCLGSECSKASSRSAIEDLLFDKVKLSDVGFVEAYNNCTGGAEIRDLICVQSYKGIKVLPPLLSENQFSGYTLAATSASLFPPWTAAAGVPFYLNVQYRINGLGVTMDVLSQNQKLIANAFNNALYAIQEGFDATNSALVKIQAVVNANAEALNNLLQQLSNRFGAISASLQEILSRLDPPEAEAQIDRLINGRLTALNAYVSQQLSDSTLVKFSAAQAMEKVNECVKSQSSRINFCGNGNHIISLVQNAPYGLYFIHFSYVPTKYVTARVSPGLCIAGDRGIAPKSGYFVNVNNTWMYTGSGYYYPEPITENNVVVMSTCAVNYTKAPYVMLNTLQSNLQDLKEELDQLHKQGSGGSGDIIKLLNEQVNKEMQSSNLYMSMSSWCYTHSLDGAGLFLFDHAAEEYEHAKKLIIFLNENNVPVQLTSISAPEHKFEGLTQIFQKAYEHEQHISESINNIVDHAIKSKDHATFNFLQWYVAEQHEEEVLFKDILDKIELIGNENHGLYLADQYVKGIAKSRKSGS

SEQ ID NO: 122 - protein, 1401 aa, synthetic construct
AVIGDLKCTSDNINDKDTGPPPISTDTVDVTNGLGTYYVLDRVYLNTTLFLNGYYPTSGSTYRNMALKGSVLLSRLWFKPPFLSDFINGIFAKVKNTKVIKDRVMYSEFPAITIGSTFVNTSYSVVVQPRTINSTQDGDNKLQGLLEVSVCQYNMCEYPQTICHPNLGNHRKELWHLDTGVVSCLYKRNFTYDVNADYLYFHFYQEGGTFYAYFTDTGVVTKFLFNVYLGMALSHYYVMPLTCNSKLTLEYWVTPLTSRQYLLAFNQDGIIFNAVDCMSDFMSEIKCKTQSIAPPTGVYELNGYTVQPIADVYRRKPNLPNCNIEAWLNDKSVPSPLNWERKTFSNCNFNMSSLMSFIQADSFTCNNIDAAKIYGMCFSSITIDKFAIPNGRKVDLQLGNLGYLQSFNYRIDTTATSCQLYYNLPAANVSVSRFNPSTWNKRFGFIEDSVFKPRPAGVLTNHDVVYAQHCFKAPKNFCPCKLNGSCVGSGPGKNNGIGTCPAGTNYLTCDNLCTPDPITFTGTYKCPQTKSLVGIGEHCSGLAVKSDYCGGNSCTCRPQAFLGWSADSCLQGDKCNIFANFILHDVNSGLTCSTDLQKANTDIILGVCVNYDLYGILGQGIFVEVNATYYNSWQNLLYDSNGNLYGFRDYITNRTFMIRSCYSGRVSAAFHANSSEPALLFRNIKCNYVFNNSLTRQLQPINYFDSYLGCVVNAYNSTAISVQTCDLTVGSGYCVDYSKNGGSGGAITTGYRFTNFEPFTVNSVNDSLEPVGGLYEIQIPSEFTIGNMVEFIQTSSPKVTIDCAAFVCGDYAACKSQLVEYGSFCDNINAILTEVNELLDTTQLQVANSLMNGVTLSTKLKDGVNFNVDDINFSPVLGCLGSECSKASSRSAIEDLLFDKVKLSDVGFVEAYNNCTGGAEIRDLICVQSYKGIKVLPPLLSENQFSGYTLAATSASLFPPWTAAAGVPFYLNVQYRINGLGVTMDVLSQNQKLIANAFNNALYAIQEGFDATNSALVKIQAVVNANAEALNNLLQQLSNRFGAISASLQEILSRLDPPEAEAQIDRLINGRLTALNAYVSQQLSDSTLVKFSAAQAMEKVNECVKSQSSRINFCGNGNHIISLVQNAPYGLYFIHFSYVPTKYVTARVSPGLCIAGDRGIAPKSGYFVNVNNTWMYTGSGYYYPEPITENNVVVMSTCAVNYTKAPYVMLNTSISELQDIKEELDQIHKQGSGGSGDIIKLLNEQVNKEMQSSNLYMSMSSWCYTHSLDGAGLFLFDHAAEEYEHAKKLIIFLNENNVPVQLTSISAPEHKFEGLTQIFQKAYEHEQHISESINNIVDHAIKSKDHATFNFLQWYVAEQHEEEVLFKDILDKIELIGNENHGLYLADQYVKGIAKSRKSGS

SEQ ID NO: 123 - protein, 1401 aa, synthetic construct
AVIGDLKCTSDNINDKDTGPPPISTDTVDVTNGLGTYYVLDRVYLNTTLFLNGYYPTSGSTYRNMALKGSVLLSRLWFKPPFLSDFINGIFAKVKNTKVIKDRVMYSEFPAITIGSTFVNTSYSVVVQPRTINSTQDGDNKLQGLLEVSVCQYNMCEYPQTICHPNLGNHRKELWHLDTGVVSCLYKRNFTYDVNADYLYFHFYQEGGTFYAYFTDTGVVTKFLFNVYLGMALSHYYVMPLTCNSKLTLEYWVTPLTSRQYLLAFNQDGIIFNAVDCMSDFMSEIKCKTQSIAPPTGVYELNGYTVQPIADVYRRKPNLPNCNIEAWLNDKSVPSPLNWERKTFSNCNFNMSSLMSFIQADSFTCNNIDAAKIYGMCFSSITIDKFAIPNGRKVDLQLGNLGYLQSFNYRIDTTATSCQLYYNLPAANVSVSRFNPSTWNKRFGFIEDSVFKPRPAGVLTNHDVVYAQHCFKAPKNFCPCKLNGSCVGSGPGKNNGIGTCPAGTNYLTCDNLCTPDPITFTGTYKCPQTKSLVGIGEHCSGLAVKSDYCGGNSCTCRPQAFLGWSADSCLQGDKCNIFANFILHDVNSGLTCSTDLQKANTDIILGVCVNYDLYGILGQGIFVEVNATYYNSWQNLLYDSNGNLYGFRDYITNRTFMIRSCYSGRVSAAFHANSSEPALLFRNIKCNYVFNNSLTRQLQPINYFDSYLGCVVNAYNSTAISVQTCDLTVGSGYCVDYSKNGGSGGAITTGYRFTNFEPFTVNSVNDSLEPVGGLYEIQIPSEFTIGNMVEFIQTSSPKVTIDCAAFVCGDYAACKSQLVEYGSFCDNINAILTEVNELLDTTQLQVANSLMNGVTLSTKLKDGVNFNVDDINFSPVLGCLGSECSKASSRSAIEDLLFDKVKLSDVGFVEAYNNCTGGAEIRDLICVQSYKGIKVLPPLLSENQFSGYTLAATSASLFPPWTAAAGVPFYLNVQYRINGLGVTMDVLSQNQKLIANAFNNALYAIQEGFDATNSALVKIQAVVNANAEALNNLLQQLSNRFGAISASLQEILSRLDPPEAEAQIDRLINGRLTALNAYVSQQLSDSTLVKFSAAQAMEKVNECVKSQSSRINFCGNGNHIISLVQNAPYGLYFIHFSYVPTKYVTARVSPGLCIAGDRGIAPKSGYFVNVNNTWMYTGSGYYYPEPITENNVVVMSTCAVNYTKAPYVMLNTSISELQDLKEELDQLHKQGSGGSGDIIKLLNEQVNKEMQSSNLYMSMSSWCYTHSLDGAGLFLFDHAAEEYEHAKKLIIFLNENNVPVQLTSISAPEHKFEGLTQIFQKAYEHEQHISESINNIVDHAIKSKDHATFNFLQWYVAEQHEEEVLFKDILDKIELIGNENHGLYLADQYVKGIAKSRKSGS

SEQ ID NO: 124 - protein, 692 aa, synthetic construct; identical to SEQ ID NO: 43

SEQ ID NO: 125 - protein, 1388 aa, synthetic construct
CNSNANLSMLQLGVPDNSSTIVTGLLPTHWFCANQSTSVYSANGFFYIDVGNHRSAFALHTGYYDANQYYIYVTNEIGLNASVTLKICKFSRNTTFDFLSNASSSFDCIVNLLFTEQLGAPLGITISGETVRLHLYNVTRTFYVPAAYKLTKLSVKCYFNYSCVFSVVNATVTVNVTTHNGRVVNYTVCDDCNGYTDNIFSVQQDGRIPNGFPFNNWFLLTNGSTLVDGVSRLYQPLRLTCLWPVPGLKSSTGFVYFNATGSDVNCNGYQHNSVVDVMRYNLNFSANSLDNLKSGVIVFKTLQYDVLFYCSNSSSGVLDTTIPFGPSSQPYYCFINSTINTTHVSTFVGILPPTVREIVVARTGQFYINGFKYFDLGFIEAVNFNVTTASATDFWTVAFATFVDVLVNVSATNIQNLLYCDSPFEKLQCEHLQFGLQDGFYSANFLDDNVLPETYVALPIYYQHTDINFTATASFGGSCYVCKPHQVNISLNGNTSVCVRTSHFSIRYIYNRVKSGSPGDSSWHIYLKSGTCPFSFSKLNNFQKFKTICFSTVEVPGSCNFPLEATWHYTSYTIVGALYVTWSEGNSITGVPYPVSGIREFSNLVLNNCTKYNIYDYVGTGIIRSSNQSLAGGITYVSNSGNLLGFKNVSTGNIFIVTPCNQPDQVAVYQQSIIGAMTAVNESRYGLQNLLQLPNFYYVSNGGNNCTTAVMTYSNFGICADGSLIPVRPRNSSDNGISAIITANLSIPSNWTTSVQVEYLQITSTPIVVDCATYVCNGNPRCKNLLKQYTSACKTIEDALRLSAHLETNDVSSMLTFDSNAFSLANVTSFGDYNLSSVLPQRNIRSSRIAGRSALEDLLFSKVVTSGLGTVDVDYKSCTKGLSIADLACAQYYNGIMVLPGVADAERMAMYTGSLIGGMVLGGLTSAAAIPFSLALQARLNYVALQTDVLQENQKILAASFNKAINNIVASFSSVNDAITQTAEAIHTVTIALNKIQDVVNQQGSALNHLTSQLRHNFQAISNSIQAIYDRLDPPQADQQVDRLITGRLAALNAFVSQVLNKYTEVRGSRRLAQQKINECVKSQSNRYGFCGNGTHIFSIVNSAPDGLLFLHTVLLPTDYKNVKAWSGICVDGIYGYVLRQPNLVLYSDNGVFRVTSRVMFQPRLPVLSDFVQIYNCNVTFVNISRVELHTVIPDYIGDLNKTLQELEQNLEKLVKKGSGGSGDIIKLLNEQVNKEMQSSNLYMSMSSWCYTHSLDGAGLFLFDHAAEEYEHAKKLIIFLNENNVPVQLTSISAPEHKFEGLTQIFQKAYEHEQHISESINNIVDHAIKSKDHATFNFLQWYVAEQHEEEVLFKDILDKIELIGNENHGLYLADQYVKGIAKSRKSGS

SEQ ID NO: 126 - protein, 1387 aa, synthetic construct
CNSNANLSMLQLGVPDNSSTIVTGLLPTHWFCANQSTSVYSANGFFYIDVGNHRSAFALHTGYYDANQYYIYVTNEIGLNASVTLKICKFSRNTTFDFLSNASSSFDCIVNLLFTEQLGAPLGITISGETVRLHLYNVTRTFYVPAAYKLTKLSVKCYFNYSCVFSVVNATVTVNVTTHNGRVVNYTVCDDCNGYTDNIFSVQQDGRIPNGFPFNNWFLLTNGSTLVDGVSRLYQPLRLTCLWPVPGLKSSTGFVYFNATGSDVNCNGYQHNSVVDVMRYNLNFSANSLDNLKSGVIVFKTLQYDVLFYCSNSSSGVLDTTIPFGPSSQPYYCFINSTINTTHVSTFVGILPPTVREIVVARTGQFYINGFKYFDLGFIEAVNFNVTTASATDFWTVAFATFVDVLVNVSATNIQNLLYCDSPFEKLQCEHLQFGLQDGFYSANFLDDNVLPETYVALPIYYQHTDINFTATASFGGSCYVCKPHQVNISLNGNTSVCVRTSHFSIRYIYNRVKSGSPGDSSWHIYLKSGTCPFSFSKLNNFQKFKTICFSTVEVPGSCNFPLEATWHYTSYTIVGALYVTWSEGNSITGVPYPVSGIREFSNLVLNNCTKYNIYDYVGTGIIRSSNQSLAGGITYVSNSGNLLGFKNVSTGNIFIVTPCNQPDQVAVYQQSIIGAMTAVNESRYGLQNLLQLPNFYYVSNGGNNCTTAVMTYSNFGICADGSLIPVRPRNSSDNGISAIITANLSIPSNWTTSVQVEYLQITSTPIVVDCATYVCNGNPRCKNLLKQYTSACKTIEDALRLSAHLETNDVSSMLTFDSNAFSLANVTSFGDYNLSSVLPQRNIRSSRIAGRSALEDLLFSKVVTSGLGTVDVDYKSCTKGLSIADLACAQYYNGIMVLPGVADAERMAMYTGSLIGGMVLGGLTSAAAIPFSLALQARLNYVALQTDVLQENQKILAASFNKAINNIVASFSSVNDAITQTAEAIHTVTIALNKIQDVVNQQGSALNHLTSQLRHNFQAISNSIQAIYDRLDPPQADQQVDRLITGRLAALNAFVSQVLNKYTEVRGSRRLAQQKINECVKSQSNRYGFCGNGTHIFSIVNSAPDGLLFLHTVLLPTDYKNVKAWSGICVDGIYGYVLRQPNLVLYSDNGVFRVTSRVMFQPRLPVLSDFVQIYNCNVTFVNISRVELHTVIPDYVDINKTLQEIAQNLDKIHKQGSGGSGDIIKLLNEQVNKEMQSSNLYMSMSSWCYTHSLDGAGLFLFDHAAEEYEHAKKLIIFLNENNVPVQLTSISAPEHKFEGLTQIFQKAYEHEQHISESINNIVDHAIKSKDHATFNFLQWYVAEQHEEEVLFKDILDKIELIGNENHGLYLADQYVKGIAKSRKSGS

SEQ ID NO: 127 - protein, 1380 aa, synthetic construct
CNSNANLSMLQLGVPDNSSTIVTGLLPTHWFCANQSTSVYSANGFFYIDVGNHRSAFALHTGYYDANQYYIYVTNEIGLNASVTLKICKFSRNTTFDFLSNASSSFDCIVNLLFTEQLGAPLGITISGETVRLHLYNVTRTFYVPAAYKLTKLSVKCYFNYSCVFSVVNATVTVNVTTHNGRVVNYTVCDDCNGYTDNIFSVQQDGRIPNGFPFNNWFLLTNGSTLVDGVSRLYQPLRLTCLWPVPGLKSSTGFVYFNATGSDVNCNGYQHNSVVDVMRYNLNFSANSLDNLKSGVIVFKTLQYDVLFYCSNSSSGVLDTTIPFGPSSQPYYCFINSTINTTHVSTFVGILPPTVREIVVARTGQFYINGFKYFDLGFIEAVNFNVTTASATDFWTVAFATFVDVLVNVSATNIQNLLYCDSPFEKLQCEHLQFGLQDGFYSANFLDDNVLPETYVALPIYYQHTDINFTATASFGGSCYVCKPHQVNISLNGNTSVCVRTSHFSIRYIYNRVKSGSPGDSSWHIYLKSGTCPFSFSKLNNFQKFKTICFSTVEVPGSCNFPLEATWHYTSYTIVGALYVTWSEGNSITGVPYPVSGIREFSNLVLNNCTKYNIYDYVGTGIIRSSNQSLAGGITYVSNSGNLLGFKNVSTGNIFIVTPCNQPDQVAVYQQSIIGAMTAVNESRYGLQNLLQLPNFYYVSNGGNNCTTAVMTYSNFGICADGSLIPVRPRNSSDNGISAIITANLSIPSNWTTSVQVEYLQITSTPIVVDCATYVCNGNPRCKNLLKQYTSACKTIEDALRLSAHLETNDVSSMLTFDSNAFSLANVTSFGDYNLSSVLPQRNIRSSRIAGRSALEDLLFSKVVTSGLGTVDVDYKSCTKGLSIADLACAQYYNGIMVLPGVADAERMAMYTGSLIGGMVLGGLTSAAAIPFSLALQARLNYVALQTDVLQENQKILAASFNKAINNIVASFSSVNDAITQTAEAIHTVTIALNKIQDVVNQQGSALNHLTSQLRHNFQAISNSIQAIYDRLDPPQADQQVDRLITGRLAALNAFVSQVLNKYTEVRGSRRLAQQKINECVKSQSNRYGFCGNGTHIFSIVNSAPDGLLFLHTVLLPTDYKNVKAWSGICVDGIYGYVLRQPNLVLYSDNGVFRVTSRVMFQPRLPVLSDFVQIYNCNVTFVNISRVELHTVIPDYVDLNKTLQEIAQQGSGGSGDIIKLLNEQVNKEMQSSNLYMSMSSWCYTHSLDGAGLFLFDHAAEEYEHAKKLIIFLNENNVPVQLTSISAPEHKFEGLTQIFQKAYEHEQHISESINNIVDHAIKSKDHATFNFLQWYVAEQHEEEVLFKDILDKIELIGNENHGLYLADQYVKGIAKSRKSGS

SEQ ID NO: 128 - protein, 1390 aa, synthetic construct
CNSNANLSMLQLGVPDNSSTIVTGLLPTHWFCANQSTSVYSANGFFYIDVGNHRSAFALHTGYYDANQYYIYVTNEIGLNASVTLKICKFSRNTTFDFLSNASSSFDCIVNLLFTEQLGAPLGITISGETVRLHLYNVTRTFYVPAAYKLTKLSVKCYFNYSCVFSVVNATVTVNVTTHNGRVVNYTVCDDCNGYTDNIFSVQQDGRIPNGFPFNNWFLLTNGSTLVDGVSRLYQPLRLTCLWPVPGLKSSTGFVYFNATGSDVNCNGYQHNSVVDVMRYNLNFSANSLDNLKSGVIVFKTLQYDVLFYCSNSSSGVLDTTIPFGPSSQPYYCFINSTINTTHVSTFVGILPPTVREIVVARTGQFYINGFKYFDLGFIEAVNFNVTTASATDFWTVAFATFVDVLVNVSATNIQNLLYCDSPFEKLQCEHLQFGLQDGFYSANFLDDNVLPETYVALPIYYQHTDINFTATASFGGSCYVCKPHQVNISLNGNTSVCVRTSHFSIRYIYNRVKSGSPGDSSWHIYLKSGTCPFSFSKLNNFQKFKTICFSTVEVPGSCNFPLEATWHYTSYTIVGALYVTWSEGNSITGVPYPVSGIREFSNLVLNNCTKYNIYDYVGTGIIRSSNQSLAGGITYVSNSGNLLGFKNVSTGNIFIVTPCNQPDQVAVYQQSIIGAMTAVNESRYGLQNLLQLPNFYYVSNGGNNCTTAVMTYSNFGICADGSLIPVRPRNSSDNGISAIITANLSIPSNWTTSVQVEYLQITSTPIVVDCATYVCNGNPRCKNLLKQYTSACKTIEDALRLSAHLETNDVSSMLTFDSNAFSLANVTSFGDYNLSSVLPQRNIRSSRIAGRSALEDLLFSKVVTSGLGTVDVDYKSCTKGLSIADLACAQYYNGIMVLPGVADAERMAMYTGSLIGGMVLGGLTSAAAIPFSLALQARLNYVALQTDVLQENQKILAASFNKAINNIVASFSSVNDAITQTAEAIHTVTIALNKIQDVVNQQGSALNHLTSQLRHNFQAISNSIQAIYDRLDPPQADQQVDRLITGRLAALNAFVSQVLNKYTEVRGSRRLAQQKINECVKSQSNRYGFCGNGTHIFSIVNSAPDGLLFLHTVLLPTDYKNVKAWSGICVDGIYGYVLRQPNLVLYSDNGVFRVTSRVMFQPRLPVLSDFVQIYNCNVTFVNISRVELHTVIPDYTGSGDINKTLQEIAQNLDKIHKQGSGGSGDIIKLLNEQVNKEMQSSNLYMSMSSWCYTHSLDGAGLFLFDHAAEEYEHAKKLIIFLNENNVPVQLTSISAPEHKFEGLTQIFQKAYEHEQHISESINNIVDHAIKSKDHATFNFLQWYVAEQHEEEVLFKDILDKIELIGNENHGLYLADQYVKGIAKSRKSGS

SEQ ID NO: 129 - protein, 1383 aa, synthetic construct
CNSNANLSMLQLGVPDNSSTIVTGLLPTHWFCANQSTSVYSANGFFYIDVGNHRSAFALHTGYYDANQYYIYVTNEIGLNASVTLKICKFSRNTTFDFLSNASSSFDCIVNLLFTEQLGAPLGITISGETVRLHLYNVTRTFYVPAAYKLTKLSVKCYFNYSCVFSVVNATVTVNVTTHNGRVVNYTVCDDCNGYTDNIFSVQQDGRIPNGFPFNNWFLLTNGSTLVDGVSRLYQPLRLTCLWPVPGLKSSTGFVYFNATGSDVNCNGYQHNSVVDVMRYNLNFSANSLDNLKSGVIVFKTLQYDVLFYCSNSSSGVLDTTIPFGPSSQPYYCFINSTINTTHVSTFVGILPPTVREIVVARTGQFYINGFKYFDLGFIEAVNFNVTTASATDFWTVAFATFVDVLVNVSATNIQNLLYCDSPFEKLQCEHLQFGLQDGFYSANFLDDNVLPETYVALPIYYQHTDINFTATASFGGSCYVCKPHQVNISLNGNTSVCVRTSHFSIRYIYNRVKSGSPGDSSWHIYLKSGTCPFSFSKLNNFQKFKTICFSTVEVPGSCNFPLEATWHYTSYTIVGALYVTWSEGNSITGVPYPVSGIREFSNLVLNNCTKYNIYDYVGTGIIRSSNQSLAGGITYVSNSGNLLGFKNVSTGNIFIVTPCNQPDQVAVYQQSIIGAMTAVNESRYGLQNLLQLPNFYYVSNGGNNCTTAVMTYSNFGICADGSLIPVRPRNSSDNGISAIITANLSIPSNWTTSVQVEYLQITSTPIVVDCATYVCNGNPRCKNLLKQYTSACKTIEDALRLSAHLETNDVSSMLTFDSNAFSLANVTSFGDYNLSSVLPQRNIRSSRIAGRSALEDLLFSKVVTSGLGTVDVDYKSCTKGLSIADLACAQYYNGIMVLPGVADAERMAMYTGSLIGGMVLGGLTSAAAIPFSLALQARLNYVALQTDVLQENQKILAASFNKAINNIVASFSSVNDAITQTAEAIHTVTIALNKIQDVVNQQGSALNHLTSQLRHNFQAISNSIQAIYDRLDPPQADQQVDRLITGRLAALNAFVSQVLNKYTEVRGSRRLAQQKINECVKSQSNRYGFCGNGTHIFSIVNSAPDGLLFLHTVLLPTDYKNVKAWSGICVDGIYGYVLRQPNLVLYSDNGVFRVTSRVMFQPRLPVLSDFVQIYNCNVTFVNISRVELHTVIPDYTGSGDLNKTLQEIAQQGSGGSGDIIKLLNEQVNKEMQSSNLYMSMSSWCYTHSLDGAGLFLFDHAAEEYEHAKKLIIFLNENNVPVQLTSISAPEHKFEGLTQIFQKAYEHEQHISESINNIVDHAIKSKDHATFNFLQWYVAEQHEEEVLFKDILDKIELIGNENHGLYLADQYVKGIAKSRKSGS

SEQ ID NO: 130 - protein, 1390 aa, synthetic construct
CNSNANLSMLQLGVPDNSSTIVTGLLPTHWFCANQSTSVYSANGFFYIDVGNHRSAFALHTGYYDANQYYIYVTNEIGLNASVTLKICKFSRNTTFDFLSNASSSFDCIVNLLFTEQLGAPLGITISGETVRLHLYNVTRTFYVPAAYKLTKLSVKCYFNYSCVFSVVNATVTVNVTTHNGRVVNYTVCDDCNGYTDNIFSVQQDGRIPNGFPFNNWFLLTNGSTLVDGVSRLYQPLRLTCLWPVPGLKSSTGFVYFNATGSDVNCNGYQHNSVVDVMRYNLNFSANSLDNLKSGVIVFKTLQYDVLFYCSNSSSGVLDTTIPFGPSSQPYYCFINSTINTTHVSTFVGILPPTVREIVVARTGQFYINGFKYFDLGFIEAVNFNVTTASATDFWTVAFATFVDVLVNVSATNIQNLLYCDSPFEKLQCEHLQFGLQDGFYSANFLDDNVLPETYVALPIYYQHTDINFTATASFGGSCYVCKPHQVNISLNGNTSVCVRTSHFSIRYIYNRVKSGSPGDSSWHIYLKSGTCPFSFSKLNNFQKFKTICFSTVEVPGSCNFPLEATWHYTSYTIVGALYVTWSEGNSITGVPYPVSGIREFSNLVLNNCTKYNIYDYVGTGIIRSSNQSLAGGITYVSNSGNLLGFKNVSTGNIFIVTPCNQPDQVAVYQQSIIGAMTAVNESRYGLQNLLQLPNFYYVSNGGNNCTTAVMTYSNFGICADGSLIPVRPRNSSDNGISAIITANLSIPSNWTTSVQVEYLQITSTPIVVDCATYVCNGNPRCKNLLKQYTSACKTIEDALRLSAHLETNDVSSMLTFDSNAFSLANVTSFGDYNLSSVLPQRNIRSSRIAGRSALEDLLFSKVVTSGLGTVDVDYKSCTKGLSIADLACAQYYNGIMVLPGVADAERMAMYTGSLIGGMVLGGLTSAAAIPFSLALQARLNYVALQTDVLQENQKILAASFNKAINNIVASFSSVNDAITQTAEAIHTVTIALNKIQDVVNQQGSALNHLTSQLRHNFQAISNSIQAIYDRLDPPQADQQVDRLITGRLAALNAFVSQVLNKYTEVRGSRRLAQQKINECVKSQSNRYGFCGNGTHIFSIVNSAPDGLLFLHTVLLPTDYKNVKAWSGICVDGIYGYVLRQPNLVLYSDNGVFRVTSRVMFQPRLPVLSDFVQIYNCNVTFVNISRVELHTVIPDYTGSGDLNKTLQEIEQNLEKLDKKGSGGSGDIIKLLNEQVNKEMQSSNLYMSMSSWCYTHSLDGAGLFLFDHAAEEYEHAKKLIIFLNENNVPVQLTSISAPEHKFEGLTQIFQKAYEHEQHISESINNIVDHAIKSKDHATFNFLQWYVAEQHEEEVLFKDILDKIELIGNENHGLYLADQYVKGIAKSRKSGS

SEQ ID NO: 131 - protein, 1415 aa, synthetic construct
CNSNANLSMLQLGVPDNSSTIVTGLLPTHWFCANQSTSVYSANGFFYIDVGNHRSAFALHTGYYDANQYYIYVTNEIGLNASVTLKICKFSRNTTFDFLSNASSSFDCIVNLLFTEQLGAPLGITISGETVRLHLYNVTRTFYVPAAYKLTKLSVKCYFNYSCVFSVVNATVTVNVTTHNGRVVNYTVCDDCNGYTDNIFSVQQDGRIPNGFPFNNWFLLTNGSTLVDGVSRLYQPLRLTCLWPVPGLKSSTGFVYFNATGSDVNCNGYQHNSVVDVMRYNLNFSANSLDNLKSGVIVFKTLQYDVLFYCSNSSSGVLDTTIPFGPSSQPYYCFINSTINTTHVSTFVGILPPTVREIVVARTGQFYINGFKYFDLGFIEAVNFNVTTASATDFWTVAFATFVDVLVNVSATNIQNLLYCDSPFEKLQCEHLQFGLQDGFYSANFLDDNVLPETYVALPIYYQHTDINFTATASFGGSCYVCKPHQVNISLNGNTSVCVRTSHFSIRYIYNRVKSGSPGDSSWHIYLKSGTCPFSFSKLNNFQKFKTICFSTVEVPGSCNFPLEATWHYTSYTIVGALYVTWSEGNSITGVPYPVSGIREFSNLVLNNCTKYNIYDYVGTGIIRSSNQSLAGGITYVSNSGNLLGFKNVSTGNIFIVTPCNQPDQVAVYQQSIIGAMTAVNESRYGLQNLLQLPNFYYVSNGGNNCTTAVMTYSNFGICADGSLIPVRPRNSSDNGISAIITANLSIPSNWTTSVQVEYLQITSTPIVVDCATYVCNGNPRCKNLLKQYTSACKTIEDALRLSAHLETNDVSSMLTFDSNAFSLANVTSFGDYNLSSVLPQRNIRSSRIAGRSALEDLLFSKVVTSGLGTVDVDYKSCTKGLSIADLACAQYYNGIMVLPGVADAERMAMYTGSLIGGMVLGGLTSAAAIPFSLALQARLNYVALQTDVLQENQKILAASFNKAINNIVASFSSVNDAITQTAEAIHTVTIALNKIQDVVNQQGSALNHLTSQLRHNFQAISNSIQAIYDRLDPPQADQQVDRLITGRLAALNAFVSQVLNKYTEVRGSRRLAQQKINECVKSQSNRYGFCGNGTHIFSIVNSAPDGLLFLHTVLLPTDYKNVKAWSGICVDGIYGYVLRQPNLVLYSDNGVFRVTSRVMFQPRLPVLSDFVQIYNCNVTFVNISRVELHTVIPDYVDLNKTLQEIEQNLEKIDKKLNDLTKNLQNLSSELKQLEAKIDQINSTGSGGSGDIIKLLNEQVNKEMQSSNLYMSMSSWCYTHSLDGAGLFLFDHAAEEYEHAKKLIIFLNENNVPVQLTSISAPEHKFEGLTQIFQKAYEHEQHISESINNIVDHAIKSKDHATFNFLQWYVAEQHEEEVLFKDILDKIELIGNENHGLYLADQYVKGIAKSRKSGS

SEQ ID NO: 132 - protein, 1418 aa, synthetic construct
CNSNANLSMLQLGVPDNSSTIVTGLLPTHWFCANQSTSVYSANGFFYIDVGNHRSAFALHTGYYDANQYYIYVTNEIGLNASVTLKICKFSRNTTFDFLSNASSSFDCIVNLLFTEQLGAPLGITISGETVRLHLYNVTRTFYVPAAYKLTKLSVKCYFNYSCVFSVVNATVTVNVTTHNGRVVNYTVCDDCNGYTDNIFSVQQDGRIPNGFPFNNWFLLTNGSTLVDGVSRLYQPLRLTCLWPVPGLKSSTGFVYFNATGSDVNCNGYQHNSVVDVMRYNLNFSANSLDNLKSGVIVFKTLQYDVLFYCSNSSSGVLDTTIPFGPSSQPYYCFINSTINTTHVSTFVGILPPTVREIVVARTGQFYINGFKYFDLGFIEAVNFNVTTASATDFWTVAFATFVDVLVNVSATNIQNLLYCDSPFEKLQCEHLQFGLQDGFYSANFLDDNVLPETYVALPIYYQHTDINFTATASFGGSCYVCKPHQVNISLNGNTSVCVRTSHFSIRYIYNRVKSGSPGDSSWHIYLKSGTCPFSFSKLNNFQKFKTICFSTVEVPGSCNFPLEATWHYTSYTIVGALYVTWSEGNSITGVPYPVSGIREFSNLVLNNCTKYNIYDYVGTGIIRSSNQSLAGGITYVSNSGNLLGFKNVSTGNIFIVTPCNQPDQVAVYQQSIIGAMTAVNESRYGLQNLLQLPNFYYVSNGGNNCTTAVMTYSNFGICADGSLIPVRPRNSSDNGISAIITANLSIPSNWTTSVQVEYLQITSTPIVVDCATYVCNGNPRCKNLLKQYTSACKTIEDALRLSAHLETNDVSSMLTFDSNAFSLANVTSFGDYNLSSVLPQRNIRSSRIAGRSALEDLLFSKVVTSGLGTVDVDYKSCTKGLSIADLACAQYYNGIMVLPGVADAERMAMYTGSLIGGMVLGGLTSAAAIPFSLALQARLNYVALQTDVLQENQKILAASFNKAINNIVASFSSVNDAITQTAEAIHTVTIALNKIQDVVNQQGSALNHLTSQLRHNFQAISNSIQAIYDRLDPPQADQQVDRLITGRLAALNAFVSQVLNKYTEVRGSRRLAQQKINECVKSQSNRYGFCGNGTHIFSIVNSAPDGLLFLHTVLLPTDYKNVKAWSGICVDGIYGYVLRQPNLVLYSDNGVFRVTSRVMFQPRLPVLSDFVQIYNCNVTFVNISRVELHTVIPDYTGSGDLNKTLQEIEQNLEKIDKKLNDLTKNLQNLSSELKQLEAKIDQINSTGSGGSGDIIKLLNEQVNKEMQSSNLYMSMSSWCYTHSLDGAGLFLFDHAAEEYEHAKKLIIFLNENNVPVQLTSISAPEHKFEGLTQIFQKAYEHEQHISESINNIVDHAIKSKDHATFNFLQWYVAEQHEEEVLFKDILDKIELIGNENHGLYLADQYVKGIAKSRKSGS

SEQ ID NO: 133 - protein, 1397 aa, synthetic construct
VIGDFNCTNSFINDYNKTIPRISEDVVDVSLGLGTYYVLNRVYLNTTLLFTGYFPKSGANFRDLALKGSIYLSTLWYKPPFLSDFNNGIFSKVKNTKLYVNNTLYSEFSTIVIGSVFVNTSYTIVVQPHNGILEITACQYTMCEYPHTVCKSKGSIRNESWHIDSSEPLCLFKKNFTYNVSADWLYFHFYQERGVFYAYYADVGMPTTFLFSLYLGTILSHYYVMPLTCNAISSNTDNETLEYWVTPLSRRQYLLNFDEHGVITNAVDCSSSFLSEIQCKTQSFAPNTGVYDLSGFTVKPVATVYRRIPNLPGSNCNIEAWLNDKSVPSPLNWERKTFSNCNFNMSSLMSFIQADSFTCNNIDAAKIYGMCFSSITIDKFAIPNGRKVDLQLGNLGYLQSFNYRIDTTATSCQLYYNLPAANVSVSRFNPSTWNKRFGFIEDSVFKPRPAGVLTNHDVVYAQHCFKAPKNFCPCKLNGSCVGSGPGKNNGIGTCPAGTNYLTCDNLCTPDPITFTGTYKCPQTKSLVGIGEHCSGLAVKSDYCGGNSCTCRPQAFLGWSADSCLQGDKCNIFANFILHDVNSGLTCSTDGSDLLYSNTEISTGVCVNYDLYGITGQGIFKEVSAAYYNNWQNLLYDSNGNIIGFKDFLTNKTYTILPCYSGRVSAAFYQNSSSPALLYRNLKCSYVLNNISFISQPFYFDSYLGCVLNAVNLTSYSVSSCDLRMGSGFCIDYALPSSGGSGSGISSPYRFVTFEPFNVSFVNDSVETVGGLFEIQIPTNFTIAGHEEFIQTSSPKVTIDCSAFVCSNYAACHDLLSEYGTFCDNINSILNEVNDLLDITQLQVANALMQGVTLSSNLNTNLHSDVDNIDFKSLLGCLGSQCGSSSRSLLEDLLFNKVKLSDVGFVEAYNNCTGGSEIRDLLCVQSFNGIKVLPPILSETQISGYTTAATVAAMFPPWSAAAGVPFSLNVQYRINGLGVTMDVLNKNQKLIANAFNKALLSIQNGFTATNSALAKIQSVVNANAQALNSLLQQLFNKFGAISSSLQEILSRLDPPEAQVQIDRLINGRLTALNAYVSQQLSDITLIKAGASRAIEKVNECVKSQSPRINFCGNGNHILSLVQNAPYGLLFIHFSYKPTSFKTVLVSPGLCLSGDRGIAPKQGYFIKQNDSWMFTGSSYYYPEPISDKNVVFMNSCSVNFTKAPFIYLNNSISELSDFEAELSQWHKNGSGGSGDIIKLLNEQVNKEMQSSNLYMSMSSWCYTHSLDGAGLFLFDHAAEEYEHAKKLIIFLNENNVPVQLTSISAPEHKFEGLTQIFQKAYEHEQHISESINNIVDHAIKSKDHATFNFLQWYVAEQHEEEVLFKDILDKIELIGNENHGLYLADQYVKGIAKSRKSGS

SEQ ID NO: 134 - protein, 1401 aa, synthetic construct
VIGDFNCTNSFINDYNKTIPRISEDVVDVSLGLGTYYVLNRVYLNTTLLFTGYFPKSGANFRDLALKGSIYLSTLWYKPPFLSDFNNGIFSKVKNTKLYVNNTLYSEFSTIVIGSVFVNTSYTIVVQPHNGILEITACQYTMCEYPHTVCKSKGSIRNESWHIDSSEPLCLFKKNFTYNVSADWLYFHFYQERGVFYAYYADVGMPTTFLFSLYLGTILSHYYVMPLTCNAISSNTDNETLEYWVTPLSRRQYLLNFDEHGVITNAVDCSSSFLSEIQCKTQSFAPNTGVYDLSGFTVKPVGSQPIADVYRRKPNLPNCNIEAWLNDKSVPSPLNWERKTFSNCNFNMSSLMSFIQADSFTCNNIDAAKIYGMCFSSITIDKFAIPNGRKVDLQLGNLGYLQSFNYRIDTTATSCQLYYNLPAANVSVSRFNPSTWNKRFGFIEDSVFKPRPAGVLTNHDVVYAQHCFKAPKNFCPCKLNGSCVGSGPGKNNGIGTCPAGTNYLTCDNLCTPDPITFTGTYKCPQTKSLVGIGEHCSGLAVKSDYCGGNSCTCRPQAFLGWSADSCLQGDKCNIFANFILHDVNSGLTCSTDLQKANTDIILGVCVNYDLYGILGQGIFVEVNATYYNSWQNLLYDSNGNLYGFRDYITNRTFMIRSCGSPCYSGRVSAAFYQNSSSPALLYRNLKCSYVLNNISFISQPFYFDSYLGCVLNAVNLTSYSVSSCDLRMGSGFCIDYALPSSGGSGSGISSPYRFVTFEPFNVSFVNDSVETVGGLFEIQIPTNFTIAGHEEFIQTSSPKVTIDCSAFVCSNYAACHDLLSEYGTFCDNINSILNEVNDLLDITQLQVANALMQGVTLSSNLNTNLHSDVDNIDFKSLLGCLGSQCGSSSRSLLEDLLFNKVKLSDVGFVEAYNNCTGGSEIRDLLCVQSFNGIKVLPPILSETQISGYTTAATVAAMFPPWSAAAGVPFSLNVQYRINGLGVTMDVLNKNQKLIANAFNKALLSIQNGFTATNSALAKIQSVVNANAQALNSLLQQLFNKFGAISSSLQEILSRLDPPEAQVQIDRLINGRLTALNAYVSQQLSDITLIKAGASRAIEKVNECVKSQSPRINFCGNGNHILSLVQNAPYGLLFIHFSYKPTSFKTVLVSPGLCLSGDRGIAPKQGYFIKQNDSWMFTGSSYYYPEPISDKNVVFMNSCSVNFTKAPFIYLNNSISELSDFEAELSQWHKNGSGGSGDIIKLLNEQVNKEMQSSNLYMSMSSWCYTHSLDGAGLFLFDHAAEEYEHAKKLIIFLNENNVPVQLTSISAPEHKFEGLTQIFQKAYEHEQHISESINNIVDHAIKSKDHATFNFLQWYVAEQHEEEVLFKDILDKIELIGNENHGLYLADQYVKGIAKSRKSGS

SEQ ID NO: 135 - protein, 1212 aa, synthetic construct
CQTTNGLNTSYSVCNGCVGYSENVFAVESGGYIPSDFAFNNWFLLTNTSSVVDGVVRSFQPLLLNCLWSVSGLRFTTGFVYFNGTGRGDCKGFSSDVLSDVIRYNLNFEENLRRGTILFKTSYGVVVFYCTNNTLVSGDAHIPFGTVLGNFYCFVNTTIGNETTSAFVGALPKTVREFVISRTGHFYINGYRYFTLGNVEAVNFNVTTAETTDFCTVALASYADVLVNVSQTSIANIIYCNSVINRLRCDQLSFDVPDGFYSTSPIQSVELPVSIVSLPVYHGSQHTDINFTATASFGGSCYVCKPHQVNISLNGNTSVCVRTSHFSIRYIYNRVKSGSPGDSSWHIYLKSGTCPFSFSKLNNFQKFKTICFSTVEVPGSCNFPLEATWHYTSYTIVGALYVTWSEGNSITGGSGVPQPVEGVSSFMNVTLDKCTKYNIYDVSGVGVIRVSNDTFLNGITYTSTSGNLLGFKDVTKGTIYSITPCNPPDQLVVYQQAVVGAMLSENFTSYGFSNVVELPKFFYASNGTYNCTDAVLTYSSFGVCADGSIIAVQPRNVSYDSVSAIVTANLSIPSNWTTSVQVEYLQITSTPIVVDCSTYVCNGNVRCVELLKQYTSACKTIEDALRNSAMLESADVSEMLTFDKKAFTLANVSSFGDYNLSSVIPSLPRSGSRVAGRSAIEDILFSKLVTSGLGTVDADYKKCTKGLSIADLACAQYYNGIMVLPGVADAERMAMYTGSLIGGIALGGLTSAASIPFSLAIQSRLNYVALQTDVLQENQKILAASFNKAMTNIVDAFTGVNDAITQTSQALQTVATALNKIQDVVNQQGNSLNHLTSQLRQNFQAISSSIQAIYDRLDPPQADQQVDRLITGRLAALNVFVSHTLTKYTEVRASRQLAQQKVNECVKSQSKRYGFCGNGTHIFSLVNAAPEGLVFLHTVLLPTQYKDVEAWSGLCVDGRNGYVLRQPNLALYKEGNYYRITSRIMFEPRIPTIADFVQIENCNVTFVNISRSELQTIVPEYIDLNKTLQELSYKLPNLTVKGSGGSGDIIKLLNEQVNKEMQSSNLYMSMSSWCYTHSLDGAGLFLFDHAAEEYEHAKKLIIFLNENNVPVQLTSISAPEHKFEGLTQIFQKAYEHEQHISESINNIVDHAIKSKDHATFNFLQWYVAEQHEEEVLFKDILDKIELIGNENHGLYLADQYVKGIAKSRKSGS

SEQ ID NO: 136 - protein, 1211 aa, synthetic construct
CQTTNGLNTSYSVCNGCVGYSENVFAVESGGYIPSDFAFNNWFLLTNTSSVVDGVVRSFQPLLLNCLWSVSGLRFTTGFVYFNGTGRGDCKGFSSDVLSDVIRYNLNFEENLRRGTILFKTSYGVVVFYCTNNTLVSGDAHIPFGTVLGNFYCFVNTTIGNETTSAFVGALPKTVREFVISRTGHFYINGYRYFTLGNVEAVNFNVTTAETTDFCTVALASYADVLVNVSQTSIANIIYCNSVINRLRCDQLSFDVPDGFYSTSPIQSVELPGSETYVALPIYYQHTDINFTATASFGGSCYVCKPHQVNISLNGNTSVCVRTSHFSIRYIYNRVKSGSPGDSSWHIYLKSGTCPFSFSKLNNFQKFKTICFSTVEVPGSCNFPLEATWHYTSYTIVGALYVTWSEGNSITGVPYPVSGIREFSNLVLNNCTKYNIYDYVGTGIIRSSNQSLAGGITYVSNSGNLLGFKNVSTGNIFIVTPCNGSPPDQLVVYQQAVVGAMLSENFTSYGFSNVVELPKFFYASNGTYNCTDAVLTYSSFGVCADGSIIAVQPRNVSYDSVSAIVTANLSIPSNWTTSVQVEYLQITSTPIVVDCSTYVCNGNVRCVELLKQYTSACKTIEDALRNSAMLESADVSEMLTFDKKAFTLANVSSFGDYNLSSVIPSLPRSGSRVAGRSAIEDILFSKLVTSGLGTVDADYKKCTKGLSIADLACAQYYNGIMVLPGVADAERMAMYTGSLIGGIALGGLTSAASIPFSLAIQSRLNYVALQTDVLQENQKILAASFNKAMTNIVDAFTGVNDAITQTSQALQTVATALNKIQDVVNQQGNSLNHLTSQLRQNFQAISSSIQAIYDRLDPPQADQQVDRLITGRLAALNVFVSHTLTKYTEVRASRQLAQQKVNECVKSQSKRYGFCGNGTHIFSLVNAAPEGLVFLHTVLLPTQYKDVEAWSGLCVDGRNGYVLRQPNLALYKEGNYYRITSRIMFEPRIPTIADFVQIENCNVTFVNISRSELQTIVPEYIDLNKTLQELSYKLPNLTVKGSGGSGDIIKLLNEQVNKEMQSSNLYMSMSSWCYTHSLDGAGLFLFDHAAEEYEHAKKLIIFLNENNVPVQLTSISAPEHKFEGLTQIFQKAYEHEQHISESINNIVDHAIKSKDHATFNFLQWYVAEQHEEEVLFKDILDKIELIGNENHGLYLADQYVKGIAKSRKSGS

SEQ ID NO: 137 - protein, 1315 aa, synthetic construct
SSQCVNLTTRTQLPPAYTNSFTRGVYYPDKVFRSSVLHSTQDLFLPFFSNVTWFHVISGTNGTKRFDNPVLPFNDGVYFASIEKSNIIRGWIFGTTLDSKTQSLLIVNNATNVVIKVCEFQFCNDPFLDHKNNKSWMESEFRVYSSANNCTFEYVSQPFLMDLEGKQGNFKNLREFVFKNIDGYFKIYSKHTPIIVREPEDLPQGFSALEPLVDLPIGINITRFQTLLALHRSYLTPGDSSSGWTAGAAAYYVGYLQPRTFLLKYNENGTITDAVDCALDPLSETKCTLKSFTVEKGIYQTSNFRVQPTESIVRFPNITNLCPFDEVFNATRFASVYAWNRKRISNCVADYSVLYNLAPFFTFKCYGVSPTKLNDLCFTNVYADSFVIRGDEVRQIAPGQTGNIADYNYKLPDDFTGCVIAWNSNKLDSKVSGNYNYLYRLFRKSNLKPFERDISTEIYQAGNKPCNGVAGFNCYFPLRSYSFRPTYGVGHQPYRVVVLSFELLHAPATVCGPKKSTNLVKNKCVNFNFNGLKGTGVLTESNKKFLPFQQFGRDIADTTDAVRDPQTLEILDITPCSFGGVSVITPGTNTSNQVAVLYQGVNCTEVPVAIHADQLTPTWRVYSTGSNVFQTRAGCLIGAEYVNNSYECDIPIGAGICASYQTQTKSHGSASSVASQSIIAYTMSLGAENSVAYSNNSIAIPTNFTISVTTEILPVSMTKTSVDCTMYICGDSTECSNLLLQYGSFCTQLKRALTGIAVEQDKNTQEVFAQVKQIYKTPPIKYFGGFNFSQILPDPSKPSKRSFIEDLLFNKVTLADAGFIKQYGDCLGDIAARDLICAQKFKGLTVLPPLLTDEMIAQYTSALLAGTITSGWTFGAGAALQIPFAMQMAYRFNGIGVTQNVLYENQKLIANQFNSAIGKIQDSLSSTASALGKLQDVVNHNAQALNTLVKQLSSKFGAISSVLNDIFSRLDPPEAEVQIDRLITGRLQSLQTYVTQQLIRAAEIRASANLAATKMSECVLGQSKRVDFCGKGYHLMSFPQSAPHGVVFLHVTYVPAQEKNFTTAPAICHDGKAHFPREGVFVSNGTHWFVTQRNFYEPQIITTDNTFVSGNCDVVIGIVNNTVYDPLQSELDSIKEELDKIHKNGSGGSGDIIKLLNEQVNKEMQSSNLYMSMSSWCYTHSLDGAGLFLFDHAAEEYEHAKKLIIFLNENNVPVQLTSISAPEHKFEGLTQIFQKAYEHEQHISESINNIVDHAIKSKDHATFNFLQWYVAEQHEEEVLFKDILDKIELIGNENHGLYLADQYVKGIAKSRKSGS

SEQ ID NO: 138 - protein, 1521 aa, synthetic construct
NITNLCPFDEVFNATRFASVYAWNRKRISNCVADYSVLYNFAPFFAFKCYGVSPTKLNDLCFTNVYADSFVIRGNEVSQIAPGQTGNIADYNYKLPDDFTGCVIAWNSNKLDSKVGGNYNYRYRLFRKSNLKPFERDISTEIYQAGNKPCNGVAGVNCYFPLQSYGFRPTYGVGHQPYRVVVLSFELLHAPATVCGPGSGGSGSSQCVNLTTRTQLPPAYTNSFTRGVYYPDKVFRSSVLHSTQDLFLPFFSNVTWFHAIHVSGTNGTKRFDNPVLPFNDGVYFASTEKSNIIRGWIFGTTLDSKTQSLLIVNNATNVVIKVCEFQFCNDPFLGVYYHKNNKSWMESEFRVYSSANNCTFEYVSQPFLMDLEGKQGNFKNLREFVFKNIDGYFKIYSKHTPINLVRDLPQGFSALEPLVDLPIGINITRFQTLLALHRSYLTPGDSSSGWTAGAAAYYVGYLQPRTFLLKYNENGTITDAVDCALDPLSETKCTLKSFTVEKGIYQTSNFRVQPTESIVRFPNITNLCPFGEVFNATRFASVYAWNRKRISNCVADYSVLYNSASFSTFKCYGVSPTKLNDLCFTNVYADSFVIRGDEVRQIAPGQTGKIADYNYKLPDDFTGCVIAWNSNNLDSKVGGNYNYLYRLFRKSNLKPFERDISTEIYQAGSTPCNGVEGFNCYFPLQSYGFQPTNGVGYQPYRVVVLSFELLHAPATVCGPKKSTNLVKNKCVNFNFNGLTGTGVLTESNKKFLPFQQFGRDIADTTDAVRDPQTLEILDITPCSFGGVSVITPGTNTSNQVAVLYQDVNCTEVPVAIHADQLTPTWRVYSTGSNVFQTRAGCLIGAEHVNNSYECDIPIGAGICASYQTQTNSPGSASSVASQSIIAYTMSLGAENSVAYSNNSIAIPTNFTISVTTEILPVSMTKTSVDCTMYICGDSTECSNLLLQYGSFCTQLNRALTGIAVEQDKNTQEVFAQVKQIYKTPPIKDFGGFNFSQILPDPSKPSKRSFIEDLLFNKVTLADAGFIKQYGDCLGDIAARDLICAQKFNGLTVLPPLLTDEMIAQYTSALLAGTITSGWTFGAGAALQIPFAMQMAYRFNGIGVTQNVLYENQKLIANQFNSAIGKIQDSLSSTASALGKLQDVVNQNAQALNTLVKQLSSNFGAISSVLNDILSRLDPPEAEVQIDRLITGRLQSLQTYVTQQLIRAAEIRASANLAATKMSECVLGQSKRVDFCGKGYHLMSFPQSAPHGVVFLHVTYVPAQEKNFTTAPAICHDGKAHFPREGVFVSNGTHWFVTQRNFYEPQIITTDNTFVSGNCDVVIGIVNNTVYDPLQSELDSIKEELDKIHKNGSGGSGDIIKLLNEQVNKEMQSSNLYMSMSSWCYTHSLDGAGLFLFDHAAEEYEHAKKLIIFLNENNVPVQLTSISAPEHKFEGLTQIFQKAYEHEQHISESINNIVDHAIKSKDHATFNFLQWYVAEQHEEEVLFKDILDKIELIGNENHGLYLADQYVKGIAKSRKSGS

SEQ ID NO: 139 - protein, 1521 aa, synthetic construct
NITNLCPFDEVFNATRFASVYAWNRKRISNCVADYSVLYNFAPFFAFKCYGVSPTKLNDLCFTNVYADSFVIRGNEVSQIAPGQTGNIADYNYKLPDDFTGCVIAWNSNKLDSKVGGNYNYQYRLFRKSNLKPFERDISTEIYQAGNKPCNGVAGFNCYFPLRSYGFRPTYGVGHQPYRVVVLSFELLHAPATVCGPGSGGSGSSQCVNLTTRTQLPPAYTNSFTRGVYYPDKVFRSSVLHSTQDLFLPFFSNVTWFHAIHVSGTNGTKRFDNPVLPFNDGVYFASTEKSNIIRGWIFGTTLDSKTQSLLIVNNATNVVIKVCEFQFCNDPFLGVYYHKNNKSWMESEFRVYSSANNCTFEYVSQPFLMDLEGKQGNFKNLREFVFKNIDGYFKIYSKHTPINLVRDLPQGFSALEPLVDLPIGINITRFQTLLALHRSYLTPGDSSSGWTAGAAAYYVGYLQPRTFLLKYNENGTITDAVDCALDPLSETKCTLKSFTVEKGIYQTSNFRVQPTESIVRFPNITNLCPFGEVFNATRFASVYAWNRKRISNCVADYSVLYNSASFSTFKCYGVSPTKLNDLCFTNVYADSFVIRGDEVRQIAPGQTGKIADYNYKLPDDFTGCVIAWNSNNLDSKVGGNYNYLYRLFRKSNLKPFERDISTEIYQAGSTPCNGVEGFNCYFPLQSYGFQPTNGVGYQPYRVVVLSFELLHAPATVCGPKKSTNLVKNKCVNFNFNGLTGTGVLTESNKKFLPFQQFGRDIADTTDAVRDPQTLEILDITPCSFGGVSVITPGTNTSNQVAVLYQDVNCTEVPVAIHADQLTPTWRVYSTGSNVFQTRAGCLIGAEHVNNSYECDIPIGAGICASYQTQTNSPGSASSVASQSIIAYTMSLGAENSVAYSNNSIAIPTNFTISVTTEILPVSMTKTSVDCTMYICGDSTECSNLLLQYGSFCTQLNRALTGIAVEQDKNTQEVFAQVKQIYKTPPIKDFGGFNFSQILPDPSKPSKRSFIEDLLFNKVTLADAGFIKQYGDCLGDIAARDLICAQKFNGLTVLPPLLTDEMIAQYTSALLAGTITSGWTFGAGAALQIPFAMQMAYRFNGIGVTQNVLYENQKLIANQFNSAIGKIQDSLSSTASALGKLQDVVNQNAQALNTLVKQLSSNFGAISSVLNDILSRLDPPEAEVQIDRLITGRLQSLQTYVTQQLIRAAEIRASANLAATKMSECVLGQSKRVDFCGKGYHLMSFPQSAPHGVVFLHVTYVPAQEKNFTTAPAICHDGKAHFPREGVFVSNGTHWFVTQRNFYEPQIITTDNTFVSGNCDVVIGIVNNTVYDPLQSELDSIKEELDKIHKNGSGGSGDIIKLLNEQVNKEMQSSNLYMSMSSWCYTHSLDGAGLFLFDHAAEEYEHAKKLIIFLNENNVPVQLTSISAPEHKFEGLTQIFQKAYEHEQHISESINNIVDHAIKSKDHATFNFLQWYVAEQHEEEVLFKDILDKIELIGNENHGLYLADQYVKGIAKSRKSGS

SEQ ID NO: 140 - protein, 1517 aa, synthetic construct
NITQLCPFNEVFNITSFPSVYAWERMRITNCVADYSVLYNSSASFSTFQCYGVSPTKLNDLCFSSVYADYFVVKGDDVRQIAPAQTGVIADYNYKLPDDFTGCVIAWNTNSLDSSNEFFYRRFRHGKIKPYGRDLSNVLFNPSGGTCSAEGLNCYKPLASYGFTQSSGIGFQPYRVVVLSFELLNAPATVCGPGSGGSGSSQCVNLTTRTQLPPAYTNSFTRGVYYPDKVFRSSVLHSTQDLFLPFFSNVTWFHAIHVSGTNGTKRFDNPVLPFNDGVYFASTEKSNIIRGWIFGTTLDSKTQSLLIVNNATNVVIKVCEFQFCNDPFLGVYYHKNNKSWMESEFRVYSSANNCTFEYVSQPFLMDLEGKQGNFKNLREFVFKNIDGYFKIYSKHTPINLVRDLPQGFSALEPLVDLPIGINITRFQTLLALHRSYLTPGDSSSGWTAGAAAYYVGYLQPRTFLLKYNENGTITDAVDCALDPLSETKCTLKSFTVEKGIYQTSNFRVQPTESIVRFPNITNLCPFGEVFNATRFASVYAWNRKRISNCVADYSVLYNSASFSTFKCYGVSPTKLNDLCFTNVYADSFVIRGDEVRQIAPGQTGKIADYNYKLPDDFTGCVIAWNSNNLDSKVGGNYNYLYRLFRKSNLKPFERDISTEIYQAGSTPCNGVEGFNCYFPLQSYGFQPTNGVGYQPYRVVVLSFELLHAPATVCGPKKSTNLVKNKCVNFNFNGLTGTGVLTESNKKFLPFQQFGRDIADTTDAVRDPQTLEILDITPCSFGGVSVITPGTNTSNQVAVLYQDVNCTEVPVAIHADQLTPTWRVYSTGSNVFQTRAGCLIGAEHVNNSYECDIPIGAGICASYQTQTNSPGSASSVASQSIIAYTMSLGAENSVAYSNNSIAIPTNFTISVTTEILPVSMTKTSVDCTMYICGDSTECSNLLLQYGSFCTQLNRALTGIAVEQDKNTQEVFAQVKQIYKTPPIKDFGGFNFSQILPDPSKPSKRSFIEDLLFNKVTLADAGFIKQYGDCLGDIAARDLICAQKFNGLTVLPPLLTDEMIAQYTSALLAGTITSGWTFGAGAALQIPFAMQMAYRFNGIGVTQNVLYENQKLIANQFNSAIGKIQDSLSSTASALGKLQDVVNQNAQALNTLVKQLSSNFGAISSVLNDILSRLDPPEAEVQIDRLITGRLQSLQTYVTQQLIRAAEIRASANLAATKMSECVLGQSKRVDFCGKGYHLMSFPQSAPHGVVFLHVTYVPAQEKNFTTAPAICHDGKAHFPREGVFVSNGTHWFVTQRNFYEPQIITTDNTFVSGNCDVVIGIVNNTVYDPLQSELDSIKEELDKIHKNGSGGSGDIIKLLNEQVNKEMQSSNLYMSMSSWCYTHSLDGAGLFLFDHAAEEYEHAKKLIIFLNENNVPVQLTSISAPEHKFEGLTQIFQKAYEHEQHISESINNIVDHAIKSKDHATFNFLQWYVAEQHEEEVLFKDILDKIELIGNENHGLYLADQYVKGIAKSRKSGS

SEQ ID NO: 141 - protein, 1517 aa, synthetic construct
NITQLCPFNEVFNITSFPSVYAWERMRITNCVADYSVLYNSSASFSTFQCYGVSPTKLNDLCFSSVYADYFVVKGDDVRQIAPAQTGVIADYNYKLPDDFTGCVIAWNTNSLDSSNEFFYRRFRHGKIKPYGRDLSNVLFNPSGGTCSAEGLNCYKPLASYGFWQSSGIGFQPYRVVVLSFELLNAPATVCGPGSGGSGSSQCVNLTTRTQLPPAYTNSFTRGVYYPDKVFRSSVLHSTQDLFLPFFSNVTWFHAIHVSGTNGTKRFDNPVLPFNDGVYFASTEKSNIIRGWIFGTTLDSKTQSLLIVNNATNVVIKVCEFQFCNDPFLGVYYHKNNKSWMESEFRVYSSANNCTFEYVSQPFLMDLEGKQGNFKNLREFVFKNIDGYFKIYSKHTPINLVRDLPQGFSALEPLVDLPIGINITRFQTLLALHRSYLTPGDSSSGWTAGAAAYYVGYLQPRTFLLKYNENGTITDAVDCALDPLSETKCTLKSFTVEKGIYQTSNFRVQPTESIVRFPNITNLCPFGEVFNATRFASVYAWNRKRISNCVADYSVLYNSASFSTFKCYGVSPTKLNDLCFTNVYADSFVIRGDEVRQIAPGQTGKIADYNYKLPDDFTGCVIAWNSNNLDSKVGGNYNYLYRLFRKSNLKPFERDISTEIYQAGSTPCNGVEGFNCYFPLQSYGFQPTNGVGYQPYRVVVLSFELLHAPATVCGPKKSTNLVKNKCVNFNFNGLTGTGVLTESNKKFLPFQQFGRDIADTTDAVRDPQTLEILDITPCSFGGVSVITPGTNTSNQVAVLYQDVNCTEVPVAIHADQLTPTWRVYSTGSNVFQTRAGCLIGAEHVNNSYECDIPIGAGICASYQTQTNSPGSASSVASQSIIAYTMSLGAENSVAYSNNSIAIPTNFTISVTTEILPVSMTKTSVDCTMYICGDSTECSNLLLQYGSFCTQLNRALTGIAVEQDKNTQEVFAQVKQIYKTPPIKDFGGFNFSQILPDPSKPSKRSFIEDLLFNKVTLADAGFIKQYGDCLGDIAARDLICAQKFNGLTVLPPLLTDEMIAQYTSALLAGTITSGWTFGAGAALQIPFAMQMAYRFNGIGVTQNVLYENQKLIANQFNSAIGKIQDSLSSTASALGKLQDVVNQNAQALNTLVKQLSSNFGAISSVLNDILSRLDPPEAEVQIDRLITGRLQSLQTYVTQQLIRAAEIRASANLAATKMSECVLGQSKRVDFCGKGYHLMSFPQSAPHGVVFLHVTYVPAQEKNFTTAPAICHDGKAHFPREGVFVSNGTHWFVTQRNFYEPQIITTDNTFVSGNCDVVIGIVNNTVYDPLQSELDSIKEELDKIHKNGSGGSGDIIKLLNEQVNKEMQSSNLYMSMSSWCYTHSLDGAGLFLFDHAAEEYEHAKKLIIFLNENNVPVQLTSISAPEHKFEGLTQIFQKAYEHEQHISESINNIVDHAIKSKDHATFNFLQWYVAEQHEEEVLFKDILDKIELIGNENHGLYLADQYVKGIAKSRKSGS

SEQ ID NO: 142 - protein, 1517 aa, synthetic construct
NITQLCPFNEVFNITSFPSVYAWERMRITNCVADYSVLYNSSASFSTFQCYGVSPTKLNDLCFSSVYADYFVVKGDDVRQIAPAQTGVIADYNYKLPDDFTGCVIAWNTNSLDSSNEFFYRRFRHGKIKPYGRDLSNVLFNPSGGTCSAEGLNCYKPLYSYGFWQSSGIGFQPYRVVVLSFELLNAPATVCGPGSGGSGSSQCVNLTTRTQLPPAYTNSFTRGVYYPDKVFRSSVLHSTQDLFLPFFSNVTWFHAIHVSGTNGTKRFDNPVLPFNDGVYFASTEKSNIIRGWIFGTTLDSKTQSLLIVNNATNVVIKVCEFQFCNDPFLGVYYHKNNKSWMESEFRVYSSANNCTFEYVSQPFLMDLEGKQGNFKNLREFVFKNIDGYFKIYSKHTPINLVRDLPQGFSALEPLVDLPIGINITRFQTLLALHRSYLTPGDSSSGWTAGAAAYYVGYLQPRTFLLKYNENGTITDAVDCALDPLSETKCTLKSFTVEKGIYQTSNFRVQPTESIVRFPNITNLCPFGEVFNATRFASVYAWNRKRISNCVADYSVLYNSASFSTFKCYGVSPTKLNDLCFTNVYADSFVIRGDEVRQIAPGQTGKIADYNYKLPDDFTGCVIAWNSNNLDSKVGGNYNYLYRLFRKSNLKPFERDISTEIYQAGSTPCNGVEGFNCYFPLQSYGFQPTNGVGYQPYRVVVLSFELLHAPATVCGPKKSTNLVKNKCVNFNFNGLTGTGVLTESNKKFLPFQQFGRDIADTTDAVRDPQTLEILDITPCSFGGVSVITPGTNTSNQVAVLYQDVNCTEVPVAIHADQLTPTWRVYSTGSNVFQTRAGCLIGAEHVNNSYECDIPIGAGICASYQTQTNSPGSASSVASQSIIAYTMSLGAENSVAYSNNSIAIPTNFTISVTTEILPVSMTKTSVDCTMYICGDSTECSNLLLQYGSFCTQLNRALTGIAVEQDKNTQEVFAQVKQIYKTPPIKDFGGFNFSQILPDPSKPSKRSFIEDLLFNKVTLADAGFIKQYGDCLGDIAARDLICAQKFNGLTVLPPLLTDEMIAQYTSALLAGTITSGWTFGAGAALQIPFAMQMAYRFNGIGVTQNVLYENQKLIANQFNSAIGKIQDSLSSTASALGKLQDVVNQNAQALNTLVKQLSSNFGAISSVLNDILSRLDPPEAEVQIDRLITGRLQSLQTYVTQQLIRAAEIRASANLAATKMSECVLGQSKRVDFCGKGYHLMSFPQSAPHGVVFLHVTYVPAQEKNFTTAPAICHDGKAHFPREGVFVSNGTHWFVTQRNFYEPQIITTDNTFVSGNCDVVIGIVNNTVYDPLQSELDSIKEELDKIHKNGSGGSGDIIKLLNEQVNKEMQSSNLYMSMSSWCYTHSLDGAGLFLFDHAAEEYEHAKKLIIFLNENNVPVQLTSISAPEHKFEGLTQIFQKAYEHEQHISESINNIVDHAIKSKDHATFNFLQWYVAEQHEEEVLFKDILDKIELIGNENHGLYLADQYVKGIAKSRKSGS

SEQ ID NO: 143 - protein, 1520 aa, synthetic construct
NITNLCPFGEVFNATTFPSVYAWERKRISNCVADYSVLYNSTSFSTFKCYGVSATKLNDLCFSNVYADSFVVKGDDVRQIAPGQTGVIADYNYKLPDDFLGCVLAWNTNSKDSSTSGNYNYLYRWVRRSKLNPYERDLSNDIYSPGGQSCSAVGPNCYNPLRPYGFFTTAGVGHQPYRVVVLSFELLNAPATVCGPGSGGSGSSQCVNLTTRTQLPPAYTNSFTRGVYYPDKVFRSSVLHSTQDLFLPFFSNVTWFHAIHVSGTNGTKRFDNPVLPFNDGVYFASTEKSNIIRGWIFGTTLDSKTQSLLIVNNATNVVIKVCEFQFCNDPFLGVYYHKNNKSWMESEFRVYSSANNCTFEYVSQPFLMDLEGKQGNFKNLREFVFKNIDGYFKIYSKHTPINLVRDLPQGFSALEPLVDLPIGINITRFQTLLALHRSYLTPGDSSSGWTAGAAAYYVGYLQPRTFLLKYNENGTITDAVDCALDPLSETKCTLKSFTVEKGIYQTSNFRVQPTESIVRFPNITNLCPFGEVFNATRFASVYAWNRKRISNCVADYSVLYNSASFSTFKCYGVSPTKLNDLCFTNVYADSFVIRGDEVRQIAPGQTGKIADYNYKLPDDFTGCVIAWNSNNLDSKVGGNYNYLYRLFRKSNLKPFERDISTEIYQAGSTPCNGVEGFNCYFPLQSYGFQPTNGVGYQPYRVVVLSFELLHAPATVCGPKKSTNLVKNKCVNFNFNGLTGTGVLTESNKKFLPFQQFGRDIADTTDAVRDPQTLEILDITPCSFGGVSVITPGTNTSNQVAVLYQDVNCTEVPVAIHADQLTPTWRVYSTGSNVFQTRAGCLIGAEHVNNSYECDIPIGAGICASYQTQTNSPGSASSVASQSIIAYTMSLGAENSVAYSNNSIAIPTNFTISVTTEILPVSMTKTSVDCTMYICGDSTECSNLLLQYGSFCTQLNRALTGIAVEQDKNTQEVFAQVKQIYKTPPIKDFGGFNFSQILPDPSKPSKRSFIEDLLFNKVTLADAGFIKQYGDCLGDIAARDLICAQKFNGLTVLPPLLTDEMIAQYTSALLAGTITSGWTFGAGAALQIPFAMQMAYRFNGIGVTQNVLYENQKLIANQFNSAIGKIQDSLSSTASALGKLQDVVNQNAQALNTLVKQLSSNFGAISSVLNDILSRLDPPEAEVQIDRLITGRLQSLQTYVTQQLIRAAEIRASANLAATKMSECVLGQSKRVDFCGKGYHLMSFPQSAPHGVVFLHVTYVPAQEKNFTTAPAICHDGKAHFPREGVFVSNGTHWFVTQRNFYEPQIITTDNTFVSGNCDVVIGIVNNTVYDPLQSELDSIKEELDKIHKNGSGGSGDIIKLLNEQVNKEMQSSNLYMSMSSWCYTHSLDGAGLFLFDHAAEEYEHAKKLIIFLNENNVPVQLTSISAPEHKFEGLTQIFQKAYEHEQHISESINNIVDHAIKSKDHATFNFLQWYVAEQHEEEVLFKDILDKIELIGNENHGLYLADQYVKGIAKSRKSGS

SEQ ID NO: 144 - protein, 1520 aa, synthetic construct
NITNLCPFGEVFNATTFPSVYAWERKRISNCVADYSVLYNSTSFSTFKCYGVSATKLNDLCFSNVYADSFVVKGDDVRQIAPGQTGVIADYNYKLPDDFTGCVLAWNTRNIDATQTGNYNYKYRSLRHGKLRPFERDISNVPFSPDGKPCTPPAFNCYWPLNDYGFYITNGIGYQPYRVVVLSFELLNAPATVCGPGSGGSGSSQCVNLTTRTQLPPAYTNSFTRGVYYPDKVFRSSVLHSTQDLFLPFFSNVTWFHAIHVSGTNGTKRFDNPVLPFNDGVYFASTEKSNIIRGWIFGTTLDSKTQSLLIVNNATNVVIKVCEFQFCNDPFLGVYYHKNNKSWMESEFRVYSSANNCTFEYVSQPFLMDLEGKQGNFKNLREFVFKNIDGYFKIYSKHTPINLVRDLPQGFSALEPLVDLPIGINITRFQTLLALHRSYLTPGDSSSGWTAGAAAYYVGYLQPRTFLLKYNENGTITDAVDCALDPLSETKCTLKSFTVEKGIYQTSNFRVQPTESIVRFPNITNLCPFGEVFNATRFASVYAWNRKRISNCVADYSVLYNSASFSTFKCYGVSPTKLNDLCFTNVYADSFVIRGDEVRQIAPGQTGKIADYNYKLPDDFTGCVIAWNSNNLDSKVGGNYNYLYRLFRKSNLKPFERDISTEIYQAGSTPCNGVEGFNCYFPLQSYGFQPTNGVGYQPYRVVVLSFELLHAPATVCGPKKSTNLVKNKCVNFNFNGLTGTGVLTESNKKFLPFQQFGRDIADTTDAVRDPQTLEILDITPCSFGGVSVITPGTNTSNQVAVLYQDVNCTEVPVAIHADQLTPTWRVYSTGSNVFQTRAGCLIGAEHVNNSYECDIPIGAGICASYQTQTNSPGSASSVASQSIIAYTMSLGAENSVAYSNNSIAIPTNFTISVTTEILPVSMTKTSVDCTMYICGDSTECSNLLLQYGSFCTQLNRALTGIAVEQDKNTQEVFAQVKQIYKTPPIKDFGGFNFSQILPDPSKPSKRSFIEDLLFNKVTLADAGFIKQYGDCLGDIAARDLICAQKFNGLTVLPPLLTDEMIAQYTSALLAGTITSGWTFGAGAALQIPFAMQMAYRFNGIGVTQNVLYENQKLIANQFNSAIGKIQDSLSSTASALGKLQDVVNQNAQALNTLVKQLSSNFGAISSVLNDILSRLDPPEAEVQIDRLITGRLQSLQTYVTQQLIRAAEIRASANLAATKMSECVLGQSKRVDFCGKGYHLMSFPQSAPHGVVFLHVTYVPAQEKNFTTAPAICHDGKAHFPREGVFVSNGTHWFVTQRNFYEPQIITTDNTFVSGNCDVVIGIVNNTVYDPLQSELDSIKEELDKIHKNGSGGSGDIIKLLNEQVNKEMQSSNLYMSMSSWCYTHSLDGAGLFLFDHAAEEYEHAKKLIIFLNENNVPVQLTSISAPEHKFEGLTQIFQKAYEHEQHISESINNIVDHAIKSKDHATFNFLQWYVAEQHEEEVLFKDILDKIELIGNENHGLYLADQYVKGIAKSRKSGS

SEQ ID NO: 145 - protein, 1502 aa, synthetic construct
NITNVCPFHKVFNATRFPSVYAWERTKISDCIADYTVFYNSTSFSTFKCYGVSPSKLIDLCFTSVYADTFLIRFSEVRQVAPGQTGVIADYNYKLPDDFTGCVIAWNTAKQDTGHYFYRSHRSTKLKPFERDLSSDENGVRTLSTYDFNPNVPLEYQATRVVVLSFELLNAPATVCGPGSGGSGSSQCVNLTTRTQLPPAYTNSFTRGVYYPDKVFRSSVLHSTQDLFLPFFSNVTWFHAIHVSGTNGTKRFDNPVLPFNDGVYFASTEKSNIIRGWIFGTTLDSKTQSLLIVNNATNVVIKVCEFQFCNDPFLGVYYHKNNKSWMESEFRVYSSANNCTFEYVSQPFLMDLEGKQGNFKNLREFVFKNIDGYFKIYSKHTPINLVRDLPQGFSALEPLVDLPIGINITRFQTLLALHRSYLTPGDSSSGWTAGAAAYYVGYLQPRTFLLKYNENGTITDAVDCALDPLSETKCTLKSFTVEKGIYQTSNFRVQPTESIVRFPNITNLCPFGEVFNATRFASVYAWNRKRISNCVADYSVLYNSASFSTFKCYGVSPTKLNDLCFTNVYADSFVIRGDEVRQIAPGQTGKIADYNYKLPDDFTGCVIAWNSNNLDSKVGGNYNYLYRLFRKSNLKPFERDISTEIYQAGSTPCNGVEGFNCYFPLQSYGFQPTNGVGYQPYRVVVLSFELLHAPATVCGPKKSTNLVKNKCVNFNFNGLTGTGVLTESNKKFLPFQQFGRDIADTTDAVRDPQTLEILDITPCSFGGVSVITPGTNTSNQVAVLYQDVNCTEVPVAIHADQLTPTWRVYSTGSNVFQTRAGCLIGAEHVNNSYECDIPIGAGICASYQTQTNSPGSASSVASQSIIAYTMSLGAENSVAYSNNSIAIPTNFTISVTTEILPVSMTKTSVDCTMYICGDSTECSNLLLQYGSFCTQLNRALTGIAVEQDKNTQEVFAQVKQIYKTPPIKDFGGFNFSQILPDPSKPSKRSFIEDLLFNKVTLADAGFIKQYGDCLGDIAARDLICAQKFNGLTVLPPLLTDEMIAQYTSALLAGTITSGWTFGAGAALQIPFAMQMAYRFNGIGVTQNVLYENQKLIANQFNSAIGKIQDSLSSTASALGKLQDVVNQNAQALNTLVKQLSSNFGAISSVLNDILSRLDPPEAEVQIDRLITGRLQSLQTYVTQQLIRAAEIRASANLAATKMSECVLGQSKRVDFCGKGYHLMSFPQSAPHGVVFLHVTYVPAQEKNFTTAPAICHDGKAHFPREGVFVSNGTHWFVTQRNFYEPQIITTDNTFVSGNCDVVIGIVNNTVYDPLQSELDSIKEELDKIHKNGSGGSGDIIKLLNEQVNKEMQSSNLYMSMSSWCYTHSLDGAGLFLFDHAAEEYEHAKKLIIFLNENNVPVQLTSISAPEHKFEGLTQIFQKAYEHEQHISESINNIVDHAIKSKDHATFNFLQWYVAEQHEEEVLFKDILDKIELIGNENHGLYLADQYVKGIAKSRKSGS

SEQ ID NO: 146 - protein, 1521 aa, synthetic construct
NITNLCPFGEVFNATTFASVYAWNRKRISNCVADYSVLYNSTSFSTFKCYGVSPTKLNDLCFTNVYADSFVVRGDEVRQIAPGQTGKIADYNYKLPDDFTGCVIAWNSNNLDSKVGGNYNYLYRLFRKSNLKPFERDISTEIYQAGSTPCNGVEGFNCYFPLQSYGFHPTNGVGYQPYRVVVLSFELLNAPATVCGPGSGGSGSSQCVNLTTRTQLPPAYTNSFTRGVYYPDKVFRSSVLHSTQDLFLPFFSNVTWFHAIHVSGTNGTKRFDNPVLPFNDGVYFASTEKSNIIRGWIFGTTLDSKTQSLLIVNNATNVVIKVCEFQFCNDPFLGVYYHKNNKSWMESEFRVYSSANNCTFEYVSQPFLMDLEGKQGNFKNLREFVFKNIDGYFKIYSKHTPINLVRDLPQGFSALEPLVDLPIGINITRFQTLLALHRSYLTPGDSSSGWTAGAAAYYVGYLQPRTFLLKYNENGTITDAVDCALDPLSETKCTLKSFTVEKGIYQTSNFRVQPTESIVRFPNITNLCPFGEVFNATRFASVYAWNRKRISNCVADYSVLYNSASFSTFKCYGVSPTKLNDLCFTNVYADSFVIRGDEVRQIAPGQTGKIADYNYKLPDDFTGCVIAWNSNNLDSKVGGNYNYLYRLFRKSNLKPFERDISTEIYQAGSTPCNGVEGFNCYFPLQSYGFQPTNGVGYQPYRVVVLSFELLHAPATVCGPKKSTNLVKNKCVNFNFNGLTGTGVLTESNKKFLPFQQFGRDIADTTDAVRDPQTLEILDITPCSFGGVSVITPGTNTSNQVAVLYQDVNCTEVPVAIHADQLTPTWRVYSTGSNVFQTRAGCLIGAEHVNNSYECDIPIGAGICASYQTQTNSPGSASSVASQSIIAYTMSLGAENSVAYSNNSIAIPTNFTISVTTEILPVSMTKTSVDCTMYICGDSTECSNLLLQYGSFCTQLNRALTGIAVEQDKNTQEVFAQVKQIYKTPPIKDFGGFNFSQILPDPSKPSKRSFIEDLLFNKVTLADAGFIKQYGDCLGDIAARDLICAQKFNGLTVLPPLLTDEMIAQYTSALLAGTITSGWTFGAGAALQIPFAMQMAYRFNGIGVTQNVLYENQKLIANQFNSAIGKIQDSLSSTASALGKLQDVVNQNAQALNTLVKQLSSNFGAISSVLNDILSRLDPPEAEVQIDRLITGRLQSLQTYVTQQLIRAAEIRASANLAATKMSECVLGQSKRVDFCGKGYHLMSFPQSAPHGVVFLHVTYVPAQEKNFTTAPAICHDGKAHFPREGVFVSNGTHWFVTQRNFYEPQIITTDNTFVSGNCDVVIGIVNNTVYDPLQSELDSIKEELDKIHKNGSGGSGDIIKLLNEQVNKEMQSSNLYMSMSSWCYTHSLDGAGLFLFDHAAEEYEHAKKLIIFLNENNVPVQLTSISAPEHKFEGLTQIFQKAYEHEQHISESINNIVDHAIKSKDHATFNFLQWYVAEQHEEEVLFKDILDKIELIGNENHGLYLADQYVKGIAKSRKSGS

SEQ ID NO: 147 - protein, 1521 aa, synthetic construct
NITNLCPFGEVFNATTFASVYAWNRKRISNCVADYSVLYNSTSFSTFKCYGVSPTKLNDLCFTNVYADSFVITGDEVRQIAPGQTGKIADYNYKLPDDFTGCVIAWNSKHIDAKEGGNFNYLYRLFRKANLKPFERDISTEIYQAGSKPCNGQTGLNCYYPLYRYGFYPTDGVGHQPYRVVVLSFELLNAPATVCGPGSGGSGSSQCVNLTTRTQLPPAYTNSFTRGVYYPDKVFRSSVLHSTQDLFLPFFSNVTWFHAIHVSGTNGTKRFDNPVLPFNDGVYFASTEKSNIIRGWIFGTTLDSKTQSLLIVNNATNVVIKVCEFQFCNDPFLGVYYHKNNKSWMESEFRVYSSANNCTFEYVSQPFLMDLEGKQGNFKNLREFVFKNIDGYFKIYSKHTPINLVRDLPQGFSALEPLVDLPIGINITRFQTLLALHRSYLTPGDSSSGWTAGAAAYYVGYLQPRTFLLKYNENGTITDAVDCALDPLSETKCTLKSFTVEKGIYQTSNFRVQPTESIVRFPNITNLCPFGEVFNATRFASVYAWNRKRISNCVADYSVLYNSASFSTFKCYGVSPTKLNDLCFTNVYADSFVIRGDEVRQIAPGQTGKIADYNYKLPDDFTGCVIAWNSNNLDSKVGGNYNYLYRLFRKSNLKPFERDISTEIYQAGSTPCNGVEGFNCYFPLQSYGFQPTNGVGYQPYRVVVLSFELLHAPATVCGPKKSTNLVKNKCVNFNFNGLTGTGVLTESNKKFLPFQQFGRDIADTTDAVRDPQTLEILDITPCSFGGVSVITPGTNTSNQVAVLYQDVNCTEVPVAIHADQLTPTWRVYSTGSNVFQTRAGCLIGAEHVNNSYECDIPIGAGICASYQTQTNSPGSASSVASQSIIAYTMSLGAENSVAYSNNSIAIPTNFTISVTTEILPVSMTKTSVDCTMYICGDSTECSNLLLQYGSFCTQLNRALTGIAVEQDKNTQEVFAQVKQIYKTPPIKDFGGFNFSQILPDPSKPSKRSFIEDLLFNKVTLADAGFIKQYGDCLGDIAARDLICAQKFNGLTVLPPLLTDEMIAQYTSALLAGTITSGWTFGAGAALQIPFAMQMAYRFNGIGVTQNVLYENQKLIANQFNSAIGKIQDSLSSTASALGKLQDVVNQNAQALNTLVKQLSSNFGAISSVLNDILSRLDPPEAEVQIDRLITGRLQSLQTYVTQQLIRAAEIRASANLAATKMSECVLGQSKRVDFCGKGYHLMSFPQSAPHGVVFLHVTYVPAQEKNFTTAPAICHDGKAHFPREGVFVSNGTHWFVTQRNFYEPQIITTDNTFVSGNCDVVIGIVNNTVYDPLQSELDSIKEELDKIHKNGSGGSGDIIKLLNEQVNKEMQSSNLYMSMSSWCYTHSLDGAGLFLFDHAAEEYEHAKKLIIFLNENNVPVQLTSISAPEHKFEGLTQIFQKAYEHEQHISESINNIVDHAIKSKDHATFNFLQWYVAEQHEEEVLFKDILDKIELIGNENHGLYLADQYVKGIAKSRKSGS

SEQ ID NO: 148 - protein, 1502 aa, synthetic construct
NITNFCPFDKVFNATRFPNVYAWQRTKISDCIADYTVLYNSTSFSTFKCYGVSPSKLIDLCFTSVYADTFLIRFSEVRQIAPGETGVIADYNYKLPDDFTGCVLAWNTAQQDIGSYFYRSHRAVKLKPFERDLSSDENGVRTLSTYDFNPNVPLDYQATRVVVLSFELLNAPATVCGPGSGGSGSSQCVNLTTRTQLPPAYTNSFTRGVYYPDKVFRSSVLHSTQDLFLPFFSNVTWFHAIHVSGTNGTKRFDNPVLPFNDGVYFASTEKSNIIRGWIFGTTLDSKTQSLLIVNNATNVVIKVCEFQFCNDPFLGVYYHKNNKSWMESEFRVYSSANNCTFEYVSQPFLMDLEGKQGNFKNLREFVFKNIDGYFKIYSKHTPINLVRDLPQGFSALEPLVDLPIGINITRFQTLLALHRSYLTPGDSSSGWTAGAAAYYVGYLQPRTFLLKYNENGTITDAVDCALDPLSETKCTLKSFTVEKGIYQTSNFRVQPTESIVRFPNITNLCPFGEVFNATRFASVYAWNRKRISNCVADYSVLYNSASFSTFKCYGVSPTKLNDLCFTNVYADSFVIRGDEVRQIAPGQTGKIADYNYKLPDDFTGCVIAWNSNNLDSKVGGNYNYLYRLFRKSNLKPFERDISTEIYQAGSTPCNGVEGFNCYFPLQSYGFQPTNGVGYQPYRVVVLSFELLHAPATVCGPKKSTNLVKNKCVNFNFNGLTGTGVLTESNKKFLPFQQFGRDIADTTDAVRDPQTLEILDITPCSFGGVSVITPGTNTSNQVAVLYQDVNCTEVPVAIHADQLTPTWRVYSTGSNVFQTRAGCLIGAEHVNNSYECDIPIGAGICASYQTQTNSPGSASSVASQSIIAYTMSLGAENSVAYSNNSIAIPTNFTISVTTEILPVSMTKTSVDCTMYICGDSTECSNLLLQYGSFCTQLNRALTGIAVEQDKNTQEVFAQVKQIYKTPPIKDFGGFNFSQILPDPSKPSKRSFIEDLLFNKVTLADAGFIKQYGDCLGDIAARDLICAQKFNGLTVLPPLLTDEMIAQYTSALLAGTITSGWTFGAGAALQIPFAMQMAYRFNGIGVTQNVLYENQKLIANQFNSAIGKIQDSLSSTASALGKLQDVVNQNAQALNTLVKQLSSNFGAISSVLNDILSRLDPPEAEVQIDRLITGRLQSLQTYVTQQLIRAAEIRASANLAATKMSECVLGQSKRVDFCGKGYHLMSFPQSAPHGVVFLHVTYVPAQEKNFTTAPAICHDGKAHFPREGVFVSNGTHWFVTQRNFYEPQIITTDNTFVSGNCDVVIGIVNNTVYDPLQSELDSIKEELDKIHKNGSGGSGDIIKLLNEQVNKEMQSSNLYMSMSSWCYTHSLDGAGLFLFDHAAEEYEHAKKLIIFLNENNVPVQLTSISAPEHKFEGLTQIFQKAYEHEQHISESINNIVDHAIKSKDHATFNFLQWYVAEQHEEEVLFKDILDKIELIGNENHGLYLADQYVKGIAKSRKSGS

SEQ ID NO: 149 - protein, 1502 aa, synthetic construct
NITNFCPFDKVFNATRFPNVYAWQRTKISDCIADYTVLYNSTSFSTFKCYGVSPSKLIDLCFTSVYADTFLIRFSEVRQIAPGETGVIADYNYKLPDDFTGCVLAWNTAQQDIGSYFYRSHRAVKLKPFERDLSSDENGVRTLSTYDFWPNVPLDYQATRVVVLSFELLNAPATVCGPGSGGSGSSQCVNLTTRTQLPPAYTNSFTRGVYYPDKVFRSSVLHSTQDLFLPFFSNVTWFHAIHVSGTNGTKRFDNPVLPFNDGVYFASTEKSNIIRGWIFGTTLDSKTQSLLIVNNATNVVIKVCEFQFCNDPFLGVYYHKNNKSWMESEFRVYSSANNCTFEYVSQPFLMDLEGKQGNFKNLREFVFKNIDGYFKIYSKHTPINLVRDLPQGFSALEPLVDLPIGINITRFQTLLALHRSYLTPGDSSSGWTAGAAAYYVGYLQPRTFLLKYNENGTITDAVDCALDPLSETKCTLKSFTVEKGIYQTSNFRVQPTESIVRFPNITNLCPFGEVFNATRFASVYAWNRKRISNCVADYSVLYNSASFSTFKCYGVSPTKLNDLCFTNVYADSFVIRGDEVRQIAPGQTGKIADYNYKLPDDFTGCVIAWNSNNLDSKVGGNYNYLYRLFRKSNLKPFERDISTEIYQAGSTPCNGVEGFNCYFPLQSYGFQPTNGVGYQPYRVVVLSFELLHAPATVCGPKKSTNLVKNKCVNFNFNGLTGTGVLTESNKKFLPFQQFGRDIADTTDAVRDPQTLEILDITPCSFGGVSVITPGTNTSNQVAVLYQDVNCTEVPVAIHADQLTPTWRVYSTGSNVFQTRAGCLIGAEHVNNSYECDIPIGAGICASYQTQTNSPGSASSVASQSIIAYTMSLGAENSVAYSNNSIAIPTNFTISVTTEILPVSMTKTSVDCTMYICGDSTECSNLLLQYGSFCTQLNRALTGIAVEQDKNTQEVFAQVKQIYKTPPIKDFGGFNFSQILPDPSKPSKRSFIEDLLFNKVTLADAGFIKQYGDCLGDIAARDLICAQKFNGLTVLPPLLTDEMIAQYTSALLAGTITSGWTFGAGAALQIPFAMQMAYRFNGIGVTQNVLYENQKLIANQFNSAIGKIQDSLSSTASALGKLQDVVNQNAQALNTLVKQLSSNFGAISSVLNDILSRLDPPEAEVQIDRLITGRLQSLQTYVTQQLIRAAEIRASANLAATKMSECVLGQSKRVDFCGKGYHLMSFPQSAPHGVVFLHVTYVPAQEKNFTTAPAICHDGKAHFPREGVFVSNGTHWFVTQRNFYEPQIITTDNTFVSGNCDVVIGIVNNTVYDPLQSELDSIKEELDKIHKNGSGGSGDIIKLLNEQVNKEMQSSNLYMSMSSWCYTHSLDGAGLFLFDHAAEEYEHAKKLIIFLNENNVPVQLTSISAPEHKFEGLTQIFQKAYEHEQHISESINNIVDHAIKSKDHATFNFLQWYVAEQHEEEVLFKDILDKIELIGNENHGLYLADQYVKGIAKSRKSGS

SEQ ID NO: 150 - protein, 1502 aa, synthetic construct
NITNFCPFDKVFNATRFPNVYAWQRTKISDCIADYTVLYNSTSFSTFKCYGVSPSKLIDLCFTSVYADTFLIRFSEVRQIAPGETGVIADYNYKLPDDFTGCVLAWNTAQQDIGSYFYRSHRAVKLKPFERDLSSDENGVRTLYTYDFWPNVPLDYQATRVVVLSFELLNAPATVCGPGSGGSGSSQCVNLTTRTQLPPAYTNSFTRGVYYPDKVFRSSVLHSTQDLFLPFFSNVTWFHAIHVSGTNGTKRFDNPVLPFNDGVYFASTEKSNIIRGWIFGTTLDSKTQSLLIVNNATNVVIKVCEFQFCNDPFLGVYYHKNNKSWMESEFRVYSSANNCTFEYVSQPFLMDLEGKQGNFKNLREFVFKNIDGYFKIYSKHTPINLVRDLPQGFSALEPLVDLPIGINITRFQTLLALHRSYLTPGDSSSGWTAGAAAYYVGYLQPRTFLLKYNENGTITDAVDCALDPLSETKCTLKSFTVEKGIYQTSNFRVQPTESIVRFPNITNLCPFGEVFNATRFASVYAWNRKRISNCVADYSVLYNSASFSTFKCYGVSPTKLNDLCFTNVYADSFVIRGDEVRQIAPGQTGKIADYNYKLPDDFTGCVIAWNSNNLDSKVGGNYNYLYRLFRKSNLKPFERDISTEIYQAGSTPCNGVEGFNCYFPLQSYGFQPTNGVGYQPYRVVVLSFELLHAPATVCGPKKSTNLVKNKCVNFNFNGLTGTGVLTESNKKFLPFQQFGRDIADTTDAVRDPQTLEILDITPCSFGGVSVITPGTNTSNQVAVLYQDVNCTEVPVAIHADQLTPTWRVYSTGSNVFQTRAGCLIGAEHVNNSYECDIPIGAGICASYQTQTNSPGSASSVASQSIIAYTMSLGAENSVAYSNNSIAIPTNFTISVTTEILPVSMTKTSVDCTMYICGDSTECSNLLLQYGSFCTQLNRALTGIAVEQDKNTQEVFAQVKQIYKTPPIKDFGGFNFSQILPDPSKPSKRSFIEDLLFNKVTLADAGFIKQYGDCLGDIAARDLICAQKFNGLTVLPPLLTDEMIAQYTSALLAGTITSGWTFGAGAALQIPFAMQMAYRFNGIGVTQNVLYENQKLIANQFNSAIGKIQDSLSSTASALGKLQDVVNQNAQALNTLVKQLSSNFGAISSVLNDILSRLDPPEAEVQIDRLITGRLQSLQTYVTQQLIRAAEIRASANLAATKMSECVLGQSKRVDFCGKGYHLMSFPQSAPHGVVFLHVTYVPAQEKNFTTAPAICHDGKAHFPREGVFVSNGTHWFVTQRNFYEPQIITTDNTFVSGNCDVVIGIVNNTVYDPLQSELDSIKEELDKIHKNGSGGSGDIIKLLNEQVNKEMQSSNLYMSMSSWCYTHSLDGAGLFLFDHAAEEYEHAKKLIIFLNENNVPVQLTSISAPEHKFEGLTQIFQKAYEHEQHISESINNIVDHAIKSKDHATFNFLQWYVAEQHEEEVLFKDILDKIELIGNENHGLYLADQYVKGIAKSRKSGS

SEQ ID NO: 151 - protein, 1502 aa, synthetic construct
NITNLCPFDAVFNATRFPSVYAWERVKISNCVADYTAFYNSTSFSTFKCYGVSPSKLIDLCFTSVYADTFLIRFSEVRQVAPGETGVIADYNYKLPDDFTGCVIAWNTAKQDVGSYFYRSHRSSKLKPFERDLSSDENGVRTLSTYDFNPNVPLDYQATRVVVLSFELLNAPATVCGPGSGGSGSSQCVNLTTRTQLPPAYTNSFTRGVYYPDKVFRSSVLHSTQDLFLPFFSNVTWFHAIHVSGTNGTKRFDNPVLPFNDGVYFASTEKSNIIRGWIFGTTLDSKTQSLLIVNNATNVVIKVCEFQFCNDPFLGVYYHKNNKSWMESEFRVYSSANNCTFEYVSQPFLMDLEGKQGNFKNLREFVFKNIDGYFKIYSKHTPINLVRDLPQGFSALEPLVDLPIGINITRFQTLLALHRSYLTPGDSSSGWTAGAAAYYVGYLQPRTFLLKYNENGTITDAVDCALDPLSETKCTLKSFTVEKGIYQTSNFRVQPTESIVRFPNITNLCPFGEVFNATRFASVYAWNRKRISNCVADYSVLYNSASFSTFKCYGVSPTKLNDLCFTNVYADSFVIRGDEVRQIAPGQTGKIADYNYKLPDDFTGCVIAWNSNNLDSKVGGNYNYLYRLFRKSNLKPFERDISTEIYQAGSTPCNGVEGFNCYFPLQSYGFQPTNGVGYQPYRVVVLSFELLHAPATVCGPKKSTNLVKNKCVNFNFNGLTGTGVLTESNKKFLPFQQFGRDIADTTDAVRDPQTLEILDITPCSFGGVSVITPGTNTSNQVAVLYQDVNCTEVPVAIHADQLTPTWRVYSTGSNVFQTRAGCLIGAEHVNNSYECDIPIGAGICASYQTQTNSPGSASSVASQSIIAYTMSLGAENSVAYSNNSIAIPTNFTISVTTEILPVSMTKTSVDCTMYICGDSTECSNLLLQYGSFCTQLNRALTGIAVEQDKNTQEVFAQVKQIYKTPPIKDFGGFNFSQILPDPSKPSKRSFIEDLLFNKVTLADAGFIKQYGDCLGDIAARDLICAQKFNGLTVLPPLLTDEMIAQYTSALLAGTITSGWTFGAGAALQIPFAMQMAYRFNGIGVTQNVLYENQKLIANQFNSAIGKIQDSLSSTASALGKLQDVVNQNAQALNTLVKQLSSNFGAISSVLNDILSRLDPPEAEVQIDRLITGRLQSLQTYVTQQLIRAAEIRASANLAATKMSECVLGQSKRVDFCGKGYHLMSFPQSAPHGVVFLHVTYVPAQEKNFTTAPAICHDGKAHFPREGVFVSNGTHWFVTQRNFYEPQIITTDNTFVSGNCDVVIGIVNNTVYDPLQSELDSIKEELDKIHKNGSGGSGDIIKLLNEQVNKEMQSSNLYMSMSSWCYTHSLDGAGLFLFDHAAEEYEHAKKLIIFLNENNVPVQLTSISAPEHKFEGLTQIFQKAYEHEQHISESINNIVDHAIKSKDHATFNFLQWYVAEQHEEEVLFKDILDKIELIGNENHGLYLADQYVKGIAKSRKSGS

SEQ ID NO: 152 - protein, 1502 aa, synthetic construct
NITNRCPFDKVFNATRFPSVYAWERTKISDCVADYTVLYNSTSFSTFKCYGVSPSKLIDLCFTSVYADTFLIRSSEVRQVAPGETGVIADYNYKLPDDFTGCVIAWNTANQDQGQYYYRSSRKEKLKPFERDLSSDENGVYTLSTYDFYPSVPLDYQATRVVVLSFELLNAPATVCGPGSGGSGSSQCVNLTTRTQLPPAYTNSFTRGVYYPDKVFRSSVLHSTQDLFLPFFSNVTWFHAIHVSGTNGTKRFDNPVLPFNDGVYFASTEKSNIIRGWIFGTTLDSKTQSLLIVNNATNVVIKVCEFQFCNDPFLGVYYHKNNKSWMESEFRVYSSANNCTFEYVSQPFLMDLEGKQGNFKNLREFVFKNIDGYFKIYSKHTPINLVRDLPQGFSALEPLVDLPIGINITRFQTLLALHRSYLTPGDSSSGWTAGAAAYYVGYLQPRTFLLKYNENGTITDAVDCALDPLSETKCTLKSFTVEKGIYQTSNFRVQPTESIVRFPNITNLCPFGEVFNATRFASVYAWNRKRISNCVADYSVLYNSASFSTFKCYGVSPTKLNDLCFTNVYADSFVIRGDEVRQIAPGQTGKIADYNYKLPDDFTGCVIAWNSNNLDSKVGGNYNYLYRLFRKSNLKPFERDISTEIYQAGSTPCNGVEGFNCYFPLQSYGFQPTNGVGYQPYRVVVLSFELLHAPATVCGPKKSTNLVKNKCVNFNFNGLTGTGVLTESNKKFLPFQQFGRDIADTTDAVRDPQTLEILDITPCSFGGVSVITPGTNTSNQVAVLYQDVNCTEVPVAIHADQLTPTWRVYSTGSNVFQTRAGCLIGAEHVNNSYECDIPIGAGICASYQTQTNSPGSASSVASQSIIAYTMSLGAENSVAYSNNSIAIPTNFTISVTTEILPVSMTKTSVDCTMYICGDSTECSNLLLQYGSFCTQLNRALTGIAVEQDKNTQEVFAQVKQIYKTPPIKDFGGFNFSQILPDPSKPSKRSFIEDLLFNKVTLADAGFIKQYGDCLGDIAARDLICAQKFNGLTVLPPLLTDEMIAQYTSALLAGTITSGWTFGAGAALQIPFAMQMAYRFNGIGVTQNVLYENQKLIANQFNSAIGKIQDSLSSTASALGKLQDVVNQNAQALNTLVKQLSSNFGAISSVLNDILSRLDPPEAEVQIDRLITGRLQSLQTYVTQQLIRAAEIRASANLAATKMSECVLGQSKRVDFCGKGYHLMSFPQSAPHGVVFLHVTYVPAQEKNFTTAPAICHDGKAHFPREGVFVSNGTHWFVTQRNFYEPQIITTDNTFVSGNCDVVIGIVNNTVYDPLQSELDSIKEELDKIHKNGSGGSGDIIKLLNEQVNKEMQSSNLYMSMSSWCYTHSLDGAGLFLFDHAAEEYEHAKKLIIFLNENNVPVQLTSISAPEHKFEGLTQIFQKAYEHEQHISESINNIVDHAIKSKDHATFNFLQWYVAEQHEEEVLFKDILDKIELIGNENHGLYLADQYVKGIAKSRKSGS

SEQ ID NO: 153 - protein, 1502 aa, synthetic construct
NITNLCPFDKVFNATRFPSVYAWERTKISDCVADYTVFYNSTSFSTFNCYGVSPSKLIDLCFTSVYADTFLIRFSEVRQVAPGQTGVIADYNYKLPDDFTGCVIAWNTAKQDVGSYFYRSHRSSKLKPFERDLSSEENGVRTLSTYDFNQYVPLEYQATRVVVLSFELLNAPATVCGPGSGGSGSSQCVNLTTRTQLPPAYTNSFTRGVYYPDKVFRSSVLHSTQDLFLPFFSNVTWFHAIHVSGTNGTKRFDNPVLPFNDGVYFASTEKSNIIRGWIFGTTLDSKTQSLLIVNNATNVVIKVCEFQFCNDPFLGVYYHKNNKSWMESEFRVYSSANNCTFEYVSQPFLMDLEGKQGNFKNLREFVFKNIDGYFKIYSKHTPINLVRDLPQGFSALEPLVDLPIGINITRFQTLLALHRSYLTPGDSSSGWTAGAAAYYVGYLQPRTFLLKYNENGTITDAVDCALDPLSETKCTLKSFTVEKGIYQTSNFRVQPTESIVRFPNITNLCPFGEVFNATRFASVYAWNRKRISNCVADYSVLYNSASFSTFKCYGVSPTKLNDLCFTNVYADSFVIRGDEVRQIAPGQTGKIADYNYKLPDDFTGCVIAWNSNNLDSKVGGNYNYLYRLFRKSNLKPFERDISTEIYQAGSTPCNGVEGFNCYFPLQSYGFQPTNGVGYQPYRVVVLSFELLHAPATVCGPKKSTNLVKNKCVNFNFNGLTGTGVLTESNKKFLPFQQFGRDIADTTDAVRDPQTLEILDITPCSFGGVSVITPGTNTSNQVAVLYQDVNCTEVPVAIHADQLTPTWRVYSTGSNVFQTRAGCLIGAEHVNNSYECDIPIGAGICASYQTQTNSPGSASSVASQSIIAYTMSLGAENSVAYSNNSIAIPTNFTISVTTEILPVSMTKTSVDCTMYICGDSTECSNLLLQYGSFCTQLNRALTGIAVEQDKNTQEVFAQVKQIYKTPPIKDFGGFNFSQILPDPSKPSKRSFIEDLLFNKVTLADAGFIKQYGDCLGDIAARDLICAQKFNGLTVLPPLLTDEMIAQYTSALLAGTITSGWTFGAGAALQIPFAMQMAYRFNGIGVTQNVLYENQKLIANQFNSAIGKIQDSLSSTASALGKLQDVVNQNAQALNTLVKQLSSNFGAISSVLNDILSRLDPPEAEVQIDRLITGRLQSLQTYVTQQLIRAAEIRASANLAATKMSECVLGQSKRVDFCGKGYHLMSFPQSAPHGVVFLHVTYVPAQEKNFTTAPAICHDGKAHFPREGVFVSNGTHWFVTQRNFYEPQIITTDNTFVSGNCDVVIGIVNNTVYDPLQSELDSIKEELDKIHKNGSGGSGDIIKLLNEQVNKEMQSSNLYMSMSSWCYTHSLDGAGLFLFDHAAEEYEHAKKLIIFLNENNVPVQLTSISAPEHKFEGLTQIFQKAYEHEQHISESINNIVDHAIKSKDHATFNFLQWYVAEQHEEEVLFKDILDKIELIGNENHGLYLADQYVKGIAKSRKSGS

SEQ ID NO: 154 - protein, 1502 aa, synthetic construct
NITNRCPFDKVFNATRFPNVYAWERTKISDCVADYTVLYNSTSFSTFKCYGVSPSKLIDLCFTSVYADTFLIRSSEVRQVAPGETGVIADYNYKLPDDFTGCVIAWNTAKQDQGQYYYRSHRKTKLKPFERDLSSDENGVRTLSTYDFYPSVPVAYQATRVVVLSFELLNAPATVCGPGSGGSGSSQCVNLTTRTQLPPAYTNSFTRGVYYPDKVFRSSVLHSTQDLFLPFFSNVTWFHAIHVSGTNGTKRFDNPVLPFNDGVYFASTEKSNIIRGWIFGTTLDSKTQSLLIVNNATNVVIKVCEFQFCNDPFLGVYYHKNNKSWMESEFRVYSSANNCTFEYVSQPFLMDLEGKQGNFKNLREFVFKNIDGYFKIYSKHTPINLVRDLPQGFSALEPLVDLPIGINITRFQTLLALHRSYLTPGDSSSGWTAGAAAYYVGYLQPRTFLLKYNENGTITDAVDCALDPLSETKCTLKSFTVEKGIYQTSNFRVQPTESIVRFPNITNLCPFGEVFNATRFASVYAWNRKRISNCVADYSVLYNSASFSTFKCYGVSPTKLNDLCFTNVYADSFVIRGDEVRQIAPGQTGKIADYNYKLPDDFTGCVIAWNSNNLDSKVGGNYNYLYRLFRKSNLKPFERDISTEIYQAGSTPCNGVEGFNCYFPLQSYGFQPTNGVGYQPYRVVVLSFELLHAPATVCGPKKSTNLVKNKCVNFNFNGLTGTGVLTESNKKFLPFQQFGRDIADTTDAVRDPQTLEILDITPCSFGGVSVITPGTNTSNQVAVLYQDVNCTEVPVAIHADQLTPTWRVYSTGSNVFQTRAGCLIGAEHVNNSYECDIPIGAGICASYQTQTNSPGSASSVASQSIIAYTMSLGAENSVAYSNNSIAIPTNFTISVTTEILPVSMTKTSVDCTMYICGDSTECSNLLLQYGSFCTQLNRALTGIAVEQDKNTQEVFAQVKQIYKTPPIKDFGGFNFSQILPDPSKPSKRSFIEDLLFNKVTLADAGFIKQYGDCLGDIAARDLICAQKFNGLTVLPPLLTDEMIAQYTSALLAGTITSGWTFGAGAALQIPFAMQMAYRFNGIGVTQNVLYENQKLIANQFNSAIGKIQDSLSSTASALGKLQDVVNQNAQALNTLVKQLSSNFGAISSVLNDILSRLDPPEAEVQIDRLITGRLQSLQTYVTQQLIRAAEIRASANLAATKMSECVLGQSKRVDFCGKGYHLMSFPQSAPHGVVFLHVTYVPAQEKNFTTAPAICHDGKAHFPREGVFVSNGTHWFVTQRNFYEPQIITTDNTFVSGNCDVVIGIVNNTVYDPLQSELDSIKEELDKIHKNGSGGSGDIIKLLNEQVNKEMQSSNLYMSMSSWCYTHSLDGAGLFLFDHAAEEYEHAKKLIIFLNENNVPVQLTSISAPEHKFEGLTQIFQKAYEHEQHISESINNIVDHAIKSKDHATFNFLQWYVAEQHEEEVLFKDILDKIELIGNENHGLYLADQYVKGIAKSRKSGS

SEQ ID NO: 155 - protein, 1502 aa, synthetic construct
NITNRCPFDKVFNASRFPNVYAWERTKISDCVADYTVLYNSTSFSTFKCYGVSPSKLIDLCFTSVYADTFLIRSSEVRQVAPGETGVIADYNYKLPDDFTGCVIAWNTAKQDQGQYYYRSSRKTKLKPFERDLTSDENGVRTLSTYDFYPNVPIEYQATRVVVLSFELLNAPATVCGPGSGGSGSSQCVNLTTRTQLPPAYTNSFTRGVYYPDKVFRSSVLHSTQDLFLPFFSNVTWFHAIHVSGTNGTKRFDNPVLPFNDGVYFASTEKSNIIRGWIFGTTLDSKTQSLLIVNNATNVVIKVCEFQFCNDPFLGVYYHKNNKSWMESEFRVYSSANNCTFEYVSQPFLMDLEGKQGNFKNLREFVFKNIDGYFKIYSKHTPINLVRDLPQGFSALEPLVDLPIGINITRFQTLLALHRSYLTPGDSSSGWTAGAAAYYVGYLQPRTFLLKYNENGTITDAVDCALDPLSETKCTLKSFTVEKGIYQTSNFRVQPTESIVRFPNITNLCPFGEVFNATRFASVYAWNRKRISNCVADYSVLYNSASFSTFKCYGVSPTKLNDLCFTNVYADSFVIRGDEVRQIAPGQTGKIADYNYKLPDDFTGCVIAWNSNNLDSKVGGNYNYLYRLFRKSNLKPFERDISTEIYQAGSTPCNGVEGFNCYFPLQSYGFQPTNGVGYQPYRVVVLSFELLHAPATVCGPKKSTNLVKNKCVNFNFNGLTGTGVLTESNKKFLPFQQFGRDIADTTDAVRDPQTLEILDITPCSFGGVSVITPGTNTSNQVAVLYQDVNCTEVPVAIHADQLTPTWRVYSTGSNVFQTRAGCLIGAEHVNNSYECDIPIGAGICASYQTQTNSPGSASSVASQSIIAYTMSLGAENSVAYSNNSIAIPTNFTISVTTEILPVSMTKTSVDCTMYICGDSTECSNLLLQYGSFCTQLNRALTGIAVEQDKNTQEVFAQVKQIYKTPPIKDFGGFNFSQILPDPSKPSKRSFIEDLLFNKVTLADAGFIKQYGDCLGDIAARDLICAQKFNGLTVLPPLLTDEMIAQYTSALLAGTITSGWTFGAGAALQIPFAMQMAYRFNGIGVTQNVLYENQKLIANQFNSAIGKIQDSLSSTASALGKLQDVVNQNAQALNTLVKQLSSNFGAISSVLNDILSRLDPPEAEVQIDRLITGRLQSLQTYVTQQLIRAAEIRASANLAATKMSECVLGQSKRVDFCGKGYHLMSFPQSAPHGVVFLHVTYVPAQEKNFTTAPAICHDGKAHFPREGVFVSNGTHWFVTQRNFYEPQIITTDNTFVSGNCDVVIGIVNNTVYDPLQSELDSIKEELDKIHKNGSGGSGDIIKLLNEQVNKEMQSSNLYMSMSSWCYTHSLDGAGLFLFDHAAEEYEHAKKLIIFLNENNVPVQLTSISAPEHKFEGLTQIFQKAYEHEQHISESINNIVDHAIKSKDHATFNFLQWYVAEQHEEEVLFKDILDKIELIGNENHGLYLADQYVKGIAKSRKSGS

SEQ ID NO: 156 - protein, 1517 aa, synthetic construct
NITNLCPFSQVFNATRFPSVYAWTRERISNCIADYSVLYNSTSFSTFRCYGVSPTKLNDLCFSNVYADSMVVRGDEVRQIAPSQTGVIADYNYKLPDDFTGCVIAWNSKAKDENGQYFYRLFRKSKLLPFQRDVSNVTYGSGKNDGCNPSEADCYWPLLKYGFTSSVSQDYQPYRVVVLSFELLNAPATVCGPGSGGSGSSQCVNLTTRTQLPPAYTNSFTRGVYYPDKVFRSSVLHSTQDLFLPFFSNVTWFHAIHVSGTNGTKRFDNPVLPFNDGVYFASTEKSNIIRGWIFGTTLDSKTQSLLIVNNATNVVIKVCEFQFCNDPFLGVYYHKNNKSWMESEFRVYSSANNCTFEYVSQPFLMDLEGKQGNFKNLREFVFKNIDGYFKIYSKHTPINLVRDLPQGFSALEPLVDLPIGINITRFQTLLALHRSYLTPGDSSSGWTAGAAAYYVGYLQPRTFLLKYNENGTITDAVDCALDPLSETKCTLKSFTVEKGIYQTSNFRVQPTESIVRFPNITNLCPFGEVFNATRFASVYAWNRKRISNCVADYSVLYNSASFSTFKCYGVSPTKLNDLCFTNVYADSFVIRGDEVRQIAPGQTGKIADYNYKLPDDFTGCVIAWNSNNLDSKVGGNYNYLYRLFRKSNLKPFERDISTEIYQAGSTPCNGVEGFNCYFPLQSYGFQPTNGVGYQPYRVVVLSFELLHAPATVCGPKKSTNLVKNKCVNFNFNGLTGTGVLTESNKKFLPFQQFGRDIADTTDAVRDPQTLEILDITPCSFGGVSVITPGTNTSNQVAVLYQDVNCTEVPVAIHADQLTPTWRVYSTGSNVFQTRAGCLIGAEHVNNSYECDIPIGAGICASYQTQTNSPGSASSVASQSIIAYTMSLGAENSVAYSNNSIAIPTNFTISVTTEILPVSMTKTSVDCTMYICGDSTECSNLLLQYGSFCTQLNRALTGIAVEQDKNTQEVFAQVKQIYKTPPIKDFGGFNFSQILPDPSKPSKRSFIEDLLFNKVTLADAGFIKQYGDCLGDIAARDLICAQKFNGLTVLPPLLTDEMIAQYTSALLAGTITSGWTFGAGAALQIPFAMQMAYRFNGIGVTQNVLYENQKLIANQFNSAIGKIQDSLSSTASALGKLQDVVNQNAQALNTLVKQLSSNFGAISSVLNDILSRLDPPEAEVQIDRLITGRLQSLQTYVTQQLIRAAEIRASANLAATKMSECVLGQSKRVDFCGKGYHLMSFPQSAPHGVVFLHVTYVPAQEKNFTTAPAICHDGKAHFPREGVFVSNGTHWFVTQRNFYEPQIITTDNTFVSGNCDVVIGIVNNTVYDPLQSELDSIKEELDKIHKNGSGGSGDIIKLLNEQVNKEMQSSNLYMSMSSWCYTHSLDGAGLFLFDHAAEEYEHAKKLIIFLNENNVPVQLTSISAPEHKFEGLTQIFQKAYEHEQHISESINNIVDHAIKSKDHATFNFLQWYVAEQHEEEVLFKDILDKIELIGNENHGLYLADQYVKGIAKSRKSGS

SEQ ID NO: 157 - protein, 1517 aa, synthetic construct
NITNLCPFSQVFNATRFPSVYAWTRERISNCIADYSVLYNSTSFSTFRCYGVSPTKLNDLCFSNVYADSMVVRGDEVRQIAPSQTGVIADYNYKLPDDFTGCVIAWNSKAKDENGQYFYRLFRKSKLLPFQRDVSNVTYGSGKNDGCNPSEADCYWPLLKYGFWSSVSQDYQPYRVVVLSFELLNAPATVCGPGSGGSGSSQCVNLTTRTQLPPAYTNSFTRGVYYPDKVFRSSVLHSTQDLFLPFFSNVTWFHAIHVSGTNGTKRFDNPVLPFNDGVYFASTEKSNIIRGWIFGTTLDSKTQSLLIVNNATNVVIKVCEFQFCNDPFLGVYYHKNNKSWMESEFRVYSSANNCTFEYVSQPFLMDLEGKQGNFKNLREFVFKNIDGYFKIYSKHTPINLVRDLPQGFSALEPLVDLPIGINITRFQTLLALHRSYLTPGDSSSGWTAGAAAYYVGYLQPRTFLLKYNENGTITDAVDCALDPLSETKCTLKSFTVEKGIYQTSNFRVQPTESIVRFPNITNLCPFGEVFNATRFASVYAWNRKRISNCVADYSVLYNSASFSTFKCYGVSPTKLNDLCFTNVYADSFVIRGDEVRQIAPGQTGKIADYNYKLPDDFTGCVIAWNSNNLDSKVGGNYNYLYRLFRKSNLKPFERDISTEIYQAGSTPCNGVEGFNCYFPLQSYGFQPTNGVGYQPYRVVVLSFELLHAPATVCGPKKSTNLVKNKCVNFNFNGLTGTGVLTESNKKFLPFQQFGRDIADTTDAVRDPQTLEILDITPCSFGGVSVITPGTNTSNQVAVLYQDVNCTEVPVAIHADQLTPTWRVYSTGSNVFQTRAGCLIGAEHVNNSYECDIPIGAGICASYQTQTNSPGSASSVASQSIIAYTMSLGAENSVAYSNNSIAIPTNFTISVTTEILPVSMTKTSVDCTMYICGDSTECSNLLLQYGSFCTQLNRALTGIAVEQDKNTQEVFAQVKQIYKTPPIKDFGGFNFSQILPDPSKPSKRSFIEDLLFNKVTLADAGFIKQYGDCLGDIAARDLICAQKFNGLTVLPPLLTDEMIAQYTSALLAGTITSGWTFGAGAALQIPFAMQMAYRFNGIGVTQNVLYENQKLIANQFNSAIGKIQDSLSSTASALGKLQDVVNQNAQALNTLVKQLSSNFGAISSVLNDILSRLDPPEAEVQIDRLITGRLQSLQTYVTQQLIRAAEIRASANLAATKMSECVLGQSKRVDFCGKGYHLMSFPQSAPHGVVFLHVTYVPAQEKNFTTAPAICHDGKAHFPREGVFVSNGTHWFVTQRNFYEPQIITTDNTFVSGNCDVVIGIVNNTVYDPLQSELDSIKEELDKIHKNGSGGSGDIIKLLNEQVNKEMQSSNLYMSMSSWCYTHSLDGAGLFLFDHAAEEYEHAKKLIIFLNENNVPVQLTSISAPEHKFEGLTQIFQKAYEHEQHISESINNIVDHAIKSKDHATFNFLQWYVAEQHEEEVLFKDILDKIELIGNENHGLYLADQYVKGIAKSRKSGS

SEQ ID NO: 158 - protein, 1517 aa, synthetic construct
NITNLCPFSQVFNATRFPSVYAWTRERISNCIADYSVLYNSTSFSTFRCYGVSPTKLNDLCFSNVYADSMVVRGDEVRQIAPSQTGVIADYNYKLPDDFTGCVIAWNSKAKDENGQYFYRLFRKSKLLPFQRDVSNVTYGSGKNDGCNPSEADCYWPLYKYGFWSSVSQDYQPYRVVVLSFELLNAPATVCGPGSGGSGSSQCVNLTTRTQLPPAYTNSFTRGVYYPDKVFRSSVLHSTQDLFLPFFSNVTWFHAIHVSGTNGTKRFDNPVLPFNDGVYFASTEKSNIIRGWIFGTTLDSKTQSLLIVNNATNVVIKVCEFQFCNDPFLGVYYHKNNKSWMESEFRVYSSANNCTFEYVSQPFLMDLEGKQGNFKNLREFVFKNIDGYFKIYSKHTPINLVRDLPQGFSALEPLVDLPIGINITRFQTLLALHRSYLTPGDSSSGWTAGAAAYYVGYLQPRTFLLKYNENGTITDAVDCALDPLSETKCTLKSFTVEKGIYQTSNFRVQPTESIVRFPNITNLCPFGEVFNATRFASVYAWNRKRISNCVADYSVLYNSASFSTFKCYGVSPTKLNDLCFTNVYADSFVIRGDEVRQIAPGQTGKIADYNYKLPDDFTGCVIAWNSNNLDSKVGGNYNYLYRLFRKSNLKPFERDISTEIYQAGSTPCNGVEGFNCYFPLQSYGFQPTNGVGYQPYRVVVLSFELLHAPATVCGPKKSTNLVKNKCVNFNFNGLTGTGVLTESNKKFLPFQQFGRDIADTTDAVRDPQTLEILDITPCSFGGVSVITPGTNTSNQVAVLYQDVNCTEVPVAIHADQLTPTWRVYSTGSNVFQTRAGCLIGAEHVNNSYECDIPIGAGICASYQTQTNSPGSASSVASQSIIAYTMSLGAENSVAYSNNSIAIPTNFTISVTTEILPVSMTKTSVDCTMYICGDSTECSNLLLQYGSFCTQLNRALTGIAVEQDKNTQEVFAQVKQIYKTPPIKDFGGFNFSQILPDPSKPSKRSFIEDLLFNKVTLADAGFIKQYGDCLGDIAARDLICAQKFNGLTVLPPLLTDEMIAQYTSALLAGTITSGWTFGAGAALQIPFAMQMAYRFNGIGVTQNVLYENQKLIANQFNSAIGKIQDSLSSTASALGKLQDVVNQNAQALNTLVKQLSSNFGAISSVLNDILSRLDPPEAEVQIDRLITGRLQSLQTYVTQQLIRAAEIRASANLAATKMSECVLGQSKRVDFCGKGYHLMSFPQSAPHGVVFLHVTYVPAQEKNFTTAPAICHDGKAHFPREGVFVSNGTHWFVTQRNFYEPQIITTDNTFVSGNCDVVIGIVNNTVYDPLQSELDSIKEELDKIHKNGSGGSGDIIKLLNEQVNKEMQSSNLYMSMSSWCYTHSLDGAGLFLFDHAAEEYEHAKKLIIFLNENNVPVQLTSISAPEHKFEGLTQIFQKAYEHEQHISESINNIVDHAIKSKDHATFNFLQWYVAEQHEEEVLFKDILDKIELIGNENHGLYLADQYVKGIAKSRKSGS

SEQ ID NO: 159 - protein, 1518 aa, synthetic construct
NMTNICPFDQVFNKTQFPSVYAWERVRISDCVSDYTVLYNSSASFSTFKCYGVSPTKLNDLCFSGVYADYFVVKGDHVHQIAPGQTGVIADYNYKLPSEFVGCILAWNTRTIDSKRGFYYRLFRHGNIRPYERDTSNVPYNAAGGTCNQPGTHNCYEPLQDYGFTSTSGVGYQPFRVVVLSFELLNAPATVCGPGSGGSGSSQCVNLTTRTQLPPAYTNSFTRGVYYPDKVFRSSVLHSTQDLFLPFFSNVTWFHAIHVSGTNGTKRFDNPVLPFNDGVYFASTEKSNIIRGWIFGTTLDSKTQSLLIVNNATNVVIKVCEFQFCNDPFLGVYYHKNNKSWMESEFRVYSSANNCTFEYVSQPFLMDLEGKQGNFKNLREFVFKNIDGYFKIYSKHTPINLVRDLPQGFSALEPLVDLPIGINITRFQTLLALHRSYLTPGDSSSGWTAGAAAYYVGYLQPRTFLLKYNENGTITDAVDCALDPLSETKCTLKSFTVEKGIYQTSNFRVQPTESIVRFPNITNLCPFGEVFNATRFASVYAWNRKRISNCVADYSVLYNSASFSTFKCYGVSPTKLNDLCFTNVYADSFVIRGDEVRQIAPGQTGKIADYNYKLPDDFTGCVIAWNSNNLDSKVGGNYNYLYRLFRKSNLKPFERDISTEIYQAGSTPCNGVEGFNCYFPLQSYGFQPTNGVGYQPYRVVVLSFELLHAPATVCGPKKSTNLVKNKCVNFNFNGLTGTGVLTESNKKFLPFQQFGRDIADTTDAVRDPQTLEILDITPCSFGGVSVITPGTNTSNQVAVLYQDVNCTEVPVAIHADQLTPTWRVYSTGSNVFQTRAGCLIGAEHVNNSYECDIPIGAGICASYQTQTNSPGSASSVASQSIIAYTMSLGAENSVAYSNNSIAIPTNFTISVTTEILPVSMTKTSVDCTMYICGDSTECSNLLLQYGSFCTQLNRALTGIAVEQDKNTQEVFAQVKQIYKTPPIKDFGGFNFSQILPDPSKPSKRSFIEDLLFNKVTLADAGFIKQYGDCLGDIAARDLICAQKFNGLTVLPPLLTDEMIAQYTSALLAGTITSGWTFGAGAALQIPFAMQMAYRFNGIGVTQNVLYENQKLIANQFNSAIGKIQDSLSSTASALGKLQDVVNQNAQALNTLVKQLSSNFGAISSVLNDILSRLDPPEAEVQIDRLITGRLQSLQTYVTQQLIRAAEIRASANLAATKMSECVLGQSKRVDFCGKGYHLMSFPQSAPHGVVFLHVTYVPAQEKNFTTAPAICHDGKAHFPREGVFVSNGTHWFVTQRNFYEPQIITTDNTFVSGNCDVVIGIVNNTVYDPLQSELDSIKEELDKIHKNGSGGSGDIIKLLNEQVNKEMQSSNLYMSMSSWCYTHSLDGAGLFLFDHAAEEYEHAKKLIIFLNENNVPVQLTSISAPEHKFEGLTQIFQKAYEHEQHISESINNIVDHAIKSKDHATFNFLQWYVAEQHEEEVLFKDILDKIELIGNENHGLYLADQYVKGIAKSRKSGS

SEQ ID NO: 160 - protein, 1518 aa, synthetic construct
NMTNICPFDQVFNKTQFPSVYAWERVRISDCVSDYTVLYNSSASFSTFKCYGVSPTKLNDLCFSGVYADYFVVKGDHVHQIAPGQTGVIADYNYKLPSEFVGCILAWNTRTIDSKRGFYYRLFRHGNIRPYERDTSNVPYNAAGGTCNQPGTHNCYEPLQDYGFWSTSGVGYQPFRVVVLSFELLNAPATVCGPGSGGSGSSQCVNLTTRTQLPPAYTNSFTRGVYYPDKVFRSSVLHSTQDLFLPFFSNVTWFHAIHVSGTNGTKRFDNPVLPFNDGVYFASTEKSNIIRGWIFGTTLDSKTQSLLIVNNATNVVIKVCEFQFCNDPFLGVYYHKNNKSWMESEFRVYSSANNCTFEYVSQPFLMDLEGKQGNFKNLREFVFKNIDGYFKIYSKHTPINLVRDLPQGFSALEPLVDLPIGINITRFQTLLALHRSYLTPGDSSSGWTAGAAAYYVGYLQPRTFLLKYNENGTITDAVDCALDPLSETKCTLKSFTVEKGIYQTSNFRVQPTESIVRFPNITNLCPFGEVFNATRFASVYAWNRKRISNCVADYSVLYNSASFSTFKCYGVSPTKLNDLCFTNVYADSFVIRGDEVRQIAPGQTGKIADYNYKLPDDFTGCVIAWNSNNLDSKVGGNYNYLYRLFRKSNLKPFERDISTEIYQAGSTPCNGVEGFNCYFPLQSYGFQPTNGVGYQPYRVVVLSFELLHAPATVCGPKKSTNLVKNKCVNFNFNGLTGTGVLTESNKKFLPFQQFGRDIADTTDAVRDPQTLEILDITPCSFGGVSVITPGTNTSNQVAVLYQDVNCTEVPVAIHADQLTPTWRVYSTGSNVFQTRAGCLIGAEHVNNSYECDIPIGAGICASYQTQTNSPGSASSVASQSIIAYTMSLGAENSVAYSNNSIAIPTNFTISVTTEILPVSMTKTSVDCTMYICGDSTECSNLLLQYGSFCTQLNRALTGIAVEQDKNTQEVFAQVKQIYKTPPIKDFGGFNFSQILPDPSKPSKRSFIEDLLFNKVTLADAGFIKQYGDCLGDIAARDLICAQKFNGLTVLPPLLTDEMIAQYTSALLAGTITSGWTFGAGAALQIPFAMQMAYRFNGIGVTQNVLYENQKLIANQFNSAIGKIQDSLSSTASALGKLQDVVNQNAQALNTLVKQLSSNFGAISSVLNDILSRLDPPEAEVQIDRLITGRLQSLQTYVTQQLIRAAEIRASANLAATKMSECVLGQSKRVDFCGKGYHLMSFPQSAPHGVVFLHVTYVPAQEKNFTTAPAICHDGKAHFPREGVFVSNGTHWFVTQRNFYEPQIITTDNTFVSGNCDVVIGIVNNTVYDPLQSELDSIKEELDKIHKNGSGGSGDIIKLLNEQVNKEMQSSNLYMSMSSWCYTHSLDGAGLFLFDHAAEEYEHAKKLIIFLNENNVPVQLTSISAPEHKFEGLTQIFQKAYEHEQHISESINNIVDHAIKSKDHATFNFLQWYVAEQHEEEVLFKDILDKIELIGNENHGLYLADQYVKGIAKSRKSGS

SEQ ID NO: 161 - protein, 1518 aa, synthetic construct
NMTNICPFDQVFNKTQFPSVYAWERVRISDCVSDYTVLYNSSASFSTFKCYGVSPTKLNDLCFSGVYADYFVVKGDHVHQIAPGQTGVIADYNYKLPSEFVGCILAWNTRTIDSKRGFYYRLFRHGNIRPYERDTSNVPYNAAGGTCNQPGTHNCYEPLYDYGFWSTSGVGYQPFRVVVLSFELLNAPATVCGPGSGGSGSSQCVNLTTRTQLPPAYTNSFTRGVYYPDKVFRSSVLHSTQDLFLPFFSNVTWFHAIHVSGTNGTKRFDNPVLPFNDGVYFASTEKSNIIRGWIFGTTLDSKTQSLLIVNNATNVVIKVCEFQFCNDPFLGVYYHKNNKSWMESEFRVYSSANNCTFEYVSQPFLMDLEGKQGNFKNLREFVFKNIDGYFKIYSKHTPINLVRDLPQGFSALEPLVDLPIGINITRFQTLLALHRSYLTPGDSSSGWTAGAAAYYVGYLQPRTFLLKYNENGTITDAVDCALDPLSETKCTLKSFTVEKGIYQTSNFRVQPTESIVRFPNITNLCPFGEVFNATRFASVYAWNRKRISNCVADYSVLYNSASFSTFKCYGVSPTKLNDLCFTNVYADSFVIRGDEVRQIAPGQTGKIADYNYKLPDDFTGCVIAWNSNNLDSKVGGNYNYLYRLFRKSNLKPFERDISTEIYQAGSTPCNGVEGFNCYFPLQSYGFQPTNGVGYQPYRVVVLSFELLHAPATVCGPKKSTNLVKNKCVNFNFNGLTGTGVLTESNKKFLPFQQFGRDIADTTDAVRDPQTLEILDITPCSFGGVSVITPGTNTSNQVAVLYQDVNCTEVPVAIHADQLTPTWRVYSTGSNVFQTRAGCLIGAEHVNNSYECDIPIGAGICASYQTQTNSPGSASSVASQSIIAYTMSLGAENSVAYSNNSIAIPTNFTISVTTEILPVSMTKTSVDCTMYICGDSTECSNLLLQYGSFCTQLNRALTGIAVEQDKNTQEVFAQVKQIYKTPPIKDFGGFNFSQILPDPSKPSKRSFIEDLLFNKVTLADAGFIKQYGDCLGDIAARDLICAQKFNGLTVLPPLLTDEMIAQYTSALLAGTITSGWTFGAGAALQIPFAMQMAYRFNGIGVTQNVLYENQKLIANQFNSAIGKIQDSLSSTASALGKLQDVVNQNAQALNTLVKQLSSNFGAISSVLNDILSRLDPPEAEVQIDRLITGRLQSLQTYVTQQLIRAAEIRASANLAATKMSECVLGQSKRVDFCGKGYHLMSFPQSAPHGVVFLHVTYVPAQEKNFTTAPAICHDGKAHFPREGVFVSNGTHWFVTQRNFYEPQIITTDNTFVSGNCDVVIGIVNNTVYDPLQSELDSIKEELDKIHKNGSGGSGDIIKLLNEQVNKEMQSSNLYMSMSSWCYTHSLDGAGLFLFDHAAEEYEHAKKLIIFLNENNVPVQLTSISAPEHKFEGLTQIFQKAYEHEQHISESINNIVDHAIKSKDHATFNFLQWYVAEQHEEEVLFKDILDKIELIGNENHGLYLADQYVKGIAKSRKSGS

SEQ ID NO: 162 - protein, 1520 aa, synthetic construct
NITNLCPFGQVFNASNFPSVYAWERLRISDCVADYAVLYNSSSSFSTFKCYGVSPTKLNDLCFSSVYADYFVVKGDDVRQIAPAQTGVIADYNYKLPDDFTGCVLAWNTNSVDSKSGNNFYYRLFRHGKIKPYERDISNVLYNSAGGTCSSISQLGCYEPLKSYGFTPTVGVGYQPYRVVVLSFELLNAPATVCGPGSGGSGSSQCVNLTTRTQLPPAYTNSFTRGVYYPDKVFRSSVLHSTQDLFLPFFSNVTWFHAIHVSGTNGTKRFDNPVLPFNDGVYFASTEKSNIIRGWIFGTTLDSKTQSLLIVNNATNVVIKVCEFQFCNDPFLGVYYHKNNKSWMESEFRVYSSANNCTFEYVSQPFLMDLEGKQGNFKNLREFVFKNIDGYFKIYSKHTPINLVRDLPQGFSALEPLVDLPIGINITRFQTLLALHRSYLTPGDSSSGWTAGAAAYYVGYLQPRTFLLKYNENGTITDAVDCALDPLSETKCTLKSFTVEKGIYQTSNFRVQPTESIVRFPNITNLCPFGEVFNATRFASVYAWNRKRISNCVADYSVLYNSASFSTFKCYGVSPTKLNDLCFTNVYADSFVIRGDEVRQIAPGQTGKIADYNYKLPDDFTGCVIAWNSNNLDSKVGGNYNYLYRLFRKSNLKPFERDISTEIYQAGSTPCNGVEGFNCYFPLQSYGFQPTNGVGYQPYRVVVLSFELLHAPATVCGPKKSTNLVKNKCVNFNFNGLTGTGVLTESNKKFLPFQQFGRDIADTTDAVRDPQTLEILDITPCSFGGVSVITPGTNTSNQVAVLYQDVNCTEVPVAIHADQLTPTWRVYSTGSNVFQTRAGCLIGAEHVNNSYECDIPIGAGICASYQTQTNSPGSASSVASQSIIAYTMSLGAENSVAYSNNSIAIPTNFTISVTTEILPVSMTKTSVDCTMYICGDSTECSNLLLQYGSFCTQLNRALTGIAVEQDKNTQEVFAQVKQIYKTPPIKDFGGFNFSQILPDPSKPSKRSFIEDLLFNKVTLADAGFIKQYGDCLGDIAARDLICAQKFNGLTVLPPLLTDEMIAQYTSALLAGTITSGWTFGAGAALQIPFAMQMAYRFNGIGVTQNVLYENQKLIANQFNSAIGKIQDSLSSTASALGKLQDVVNQNAQALNTLVKQLSSNFGAISSVLNDILSRLDPPEAEVQIDRLITGRLQSLQTYVTQQLIRAAEIRASANLAATKMSECVLGQSKRVDFCGKGYHLMSFPQSAPHGVVFLHVTYVPAQEKNFTTAPAICHDGKAHFPREGVFVSNGTHWFVTQRNFYEPQIITTDNTFVSGNCDVVIGIVNNTVYDPLQSELDSIKEELDKIHKNGSGGSGDIIKLLNEQVNKEMQSSNLYMSMSSWCYTHSLDGAGLFLFDHAAEEYEHAKKLIIFLNENNVPVQLTSISAPEHKFEGLTQIFQKAYEHEQHISESINNIVDHAIKSKDHATFNFLQWYVAEQHEEEVLFKDILDKIELIGNENHGLYLADQYVKGIAKSRKSGS

SEQ ID NO: 163 - protein, 1520 aa, synthetic construct
NITNLCPFGQVFNASNFPSVYAWERLRISDCVADYAVLYNSSSSFSTFKCYGVSPTKLNDLCFSSVYADYFVVKGDDVRQIAPAQTGVIADYNYKLPDDFTGCVLAWNTNSVDSKSGNNFYYRLFRHGKIKPYERDISNVLYNSAGGTCSSISQLGCYEPLKSYGFWPTVGVGYQPYRVVVLSFELLNAPATVCGPGSGGSGSSQCVNLTTRTQLPPAYTNSFTRGVYYPDKVFRSSVLHSTQDLFLPFFSNVTWFHAIHVSGTNGTKRFDNPVLPFNDGVYFASTEKSNIIRGWIFGTTLDSKTQSLLIVNNATNVVIKVCEFQFCNDPFLGVYYHKNNKSWMESEFRVYSSANNCTFEYVSQPFLMDLEGKQGNFKNLREFVFKNIDGYFKIYSKHTPINLVRDLPQGFSALEPLVDLPIGINITRFQTLLALHRSYLTPGDSSSGWTAGAAAYYVGYLQPRTFLLKYNENGTITDAVDCALDPLSETKCTLKSFTVEKGIYQTSNFRVQPTESIVRFPNITNLCPFGEVFNATRFASVYAWNRKRISNCVADYSVLYNSASFSTFKCYGVSPTKLNDLCFTNVYADSFVIRGDEVRQIAPGQTGKIADYNYKLPDDFTGCVIAWNSNNLDSKVGGNYNYLYRLFRKSNLKPFERDISTEIYQAGSTPCNGVEGFNCYFPLQSYGFQPTNGVGYQPYRVVVLSFELLHAPATVCGPKKSTNLVKNKCVNFNFNGLTGTGVLTESNKKFLPFQQFGRDIADTTDAVRDPQTLEILDITPCSFGGVSVITPGTNTSNQVAVLYQDVNCTEVPVAIHADQLTPTWRVYSTGSNVFQTRAGCLIGAEHVNNSYECDIPIGAGICASYQTQTNSPGSASSVASQSIIAYTMSLGAENSVAYSNNSIAIPTNFTISVTTEILPVSMTKTSVDCTMYICGDSTECSNLLLQYGSFCTQLNRALTGIAVEQDKNTQEVFAQVKQIYKTPPIKDFGGFNFSQILPDPSKPSKRSFIEDLLFNKVTLADAGFIKQYGDCLGDIAARDLICAQKFNGLTVLPPLLTDEMIAQYTSALLAGTITSGWTFGAGAALQIPFAMQMAYRFNGIGVTQNVLYENQKLIANQFNSAIGKIQDSLSSTASALGKLQDVVNQNAQALNTLVKQLSSNFGAISSVLNDILSRLDPPEAEVQIDRLITGRLQSLQTYVTQQLIRAAEIRASANLAATKMSECVLGQSKRVDFCGKGYHLMSFPQSAPHGVVFLHVTYVPAQEKNFTTAPAICHDGKAHFPREGVFVSNGTHWFVTQRNFYEPQIITTDNTFVSGNCDVVIGIVNNTVYDPLQSELDSIKEELDKIHKNGSGGSGDIIKLLNEQVNKEMQSSNLYMSMSSWCYTHSLDGAGLFLFDHAAEEYEHAKKLIIFLNENNVPVQLTSISAPEHKFEGLTQIFQKAYEHEQHISESINNIVDHAIKSKDHATFNFLQWYVAEQHEEEVLFKDILDKIELIGNENHGLYLADQYVKGIAKSRKSGS

SEQ ID NO: 164 - protein, 1520 aa, synthetic construct
NITNLCPFGQVFNASNFPSVYAWERLRISDCVADYAVLYNSSSSFSTFKCYGVSPTKLNDLCFSSVYADYFVVKGDDVRQIAPAQTGVIADYNYKLPDDFTGCVLAWNTNSVDSKSGNNFYYRLFRHGKIKPYERDISNVLYNSAGGTCSSISQLGCYEPLYSYGFWPTVGVGYQPYRVVVLSFELLNAPATVCGPGSGGSGSSQCVNLTTRTQLPPAYTNSFTRGVYYPDKVFRSSVLHSTQDLFLPFFSNVTWFHAIHVSGTNGTKRFDNPVLPFNDGVYFASTEKSNIIRGWIFGTTLDSKTQSLLIVNNATNVVIKVCEFQFCNDPFLGVYYHKNNKSWMESEFRVYSSANNCTFEYVSQPFLMDLEGKQGNFKNLREFVFKNIDGYFKIYSKHTPINLVRDLPQGFSALEPLVDLPIGINITRFQTLLALHRSYLTPGDSSSGWTAGAAAYYVGYLQPRTFLLKYNENGTITDAVDCALDPLSETKCTLKSFTVEKGIYQTSNFRVQPTESIVRFPNITNLCPFGEVFNATRFASVYAWNRKRISNCVADYSVLYNSASFSTFKCYGVSPTKLNDLCFTNVYADSFVIRGDEVRQIAPGQTGKIADYNYKLPDDFTGCVIAWNSNNLDSKVGGNYNYLYRLFRKSNLKPFERDISTEIYQAGSTPCNGVEGFNCYFPLQSYGFQPTNGVGYQPYRVVVLSFELLHAPATVCGPKKSTNLVKNKCVNFNFNGLTGTGVLTESNKKFLPFQQFGRDIADTTDAVRDPQTLEILDITPCSFGGVSVITPGTNTSNQVAVLYQDVNCTEVPVAIHADQLTPTWRVYSTGSNVFQTRAGCLIGAEHVNNSYECDIPIGAGICASYQTQTNSPGSASSVASQSIIAYTMSLGAENSVAYSNNSIAIPTNFTISVTTEILPVSMTKTSVDCTMYICGDSTECSNLLLQYGSFCTQLNRALTGIAVEQDKNTQEVFAQVKQIYKTPPIKDFGGFNFSQILPDPSKPSKRSFIEDLLFNKVTLADAGFIKQYGDCLGDIAARDLICAQKFNGLTVLPPLLTDEMIAQYTSALLAGTITSGWTFGAGAALQIPFAMQMAYRFNGIGVTQNVLYENQKLIANQFNSAIGKIQDSLSSTASALGKLQDVVNQNAQALNTLVKQLSSNFGAISSVLNDILSRLDPPEAEVQIDRLITGRLQSLQTYVTQQLIRAAEIRASANLAATKMSECVLGQSKRVDFCGKGYHLMSFPQSAPHGVVFLHVTYVPAQEKNFTTAPAICHDGKAHFPREGVFVSNGTHWFVTQRNFYEPQIITTDNTFVSGNCDVVIGIVNNTVYDPLQSELDSIKEELDKIHKNGSGGSGDIIKLLNEQVNKEMQSSNLYMSMSSWCYTHSLDGAGLFLFDHAAEEYEHAKKLIIFLNENNVPVQLTSISAPEHKFEGLTQIFQKAYEHEQHISESINNIVDHAIKSKDHATFNFLQWYVAEQHEEEVLFKDILDKIELIGNENHGLYLADQYVKGIAKSRKSGS

SEQ ID NO: 165 - protein, 1517 aa, synthetic construct
NITNLCPFSQVFNATRFPSVYAWTRERISNCIADYSVLYNSTSFSTFRCYGVSPTKLNDLCFSNVYADSMVVRGDEVRQIAPSQTGVIADYNYKLPDDFTGCVIAWNSKAKDENGQYFYRLFRKSKLLPFQRDVSNVTYGSGKNDGCNPSEADCYWPLLKYGFTGSVSQDYQPYRVVVLSFELLNAPATVCGPGSGGSGSSQCVNLTTRTQLPPAYTNSFTRGVYYPDKVFRSSVLHSTQDLFLPFFSNVTWFHAIHVSGTNGTKRFDNPVLPFNDGVYFASTEKSNIIRGWIFGTTLDSKTQSLLIVNNATNVVIKVCEFQFCNDPFLGVYYHKNNKSWMESEFRVYSSANNCTFEYVSQPFLMDLEGKQGNFKNLREFVFKNIDGYFKIYSKHTPINLVRDLPQGFSALEPLVDLPIGINITRFQTLLALHRSYLTPGDSSSGWTAGAAAYYVGYLQPRTFLLKYNENGTITDAVDCALDPLSETKCTLKSFTVEKGIYQTSNFRVQPTESIVRFPNITNLCPFGEVFNATRFASVYAWNRKRISNCVADYSVLYNSASFSTFKCYGVSPTKLNDLCFTNVYADSFVIRGDEVRQIAPGQTGKIADYNYKLPDDFTGCVIAWNSNNLDSKVGGNYNYLYRLFRKSNLKPFERDISTEIYQAGSTPCNGVEGFNCYFPLQSYGFQPTNGVGYQPYRVVVLSFELLHAPATVCGPKKSTNLVKNKCVNFNFNGLTGTGVLTESNKKFLPFQQFGRDIADTTDAVRDPQTLEILDITPCSFGGVSVITPGTNTSNQVAVLYQDVNCTEVPVAIHADQLTPTWRVYSTGSNVFQTRAGCLIGAEHVNNSYECDIPIGAGICASYQTQTNSPGSASSVASQSIIAYTMSLGAENSVAYSNNSIAIPTNFTISVTTEILPVSMTKTSVDCTMYICGDSTECSNLLLQYGSFCTQLNRALTGIAVEQDKNTQEVFAQVKQIYKTPPIKDFGGFNFSQILPDPSKPSKRSFIEDLLFNKVTLADAGFIKQYGDCLGDIAARDLICAQKFNGLTVLPPLLTDEMIAQYTSALLAGTITSGWTFGAGAALQIPFAMQMAYRFNGIGVTQNVLYENQKLIANQFNSAIGKIQDSLSSTASALGKLQDVVNQNAQALNTLVKQLSSNFGAISSVLNDILSRLDPPEAEVQIDRLITGRLQSLQTYVTQQLIRAAEIRASANLAATKMSECVLGQSKRVDFCGKGYHLMSFPQSAPHGVVFLHVTYVPAQEKNFTTAPAICHDGKAHFPREGVFVSNGTHWFVTQRNFYEPQIITTDNTFVSGNCDVVIGIVNNTVYDPLQSELDSIKEELDKIHKNGSGGSGDIIKLLNEQVNKEMQSSNLYMSMSSWCYTHSLDGAGLFLFDHAAEEYEHAKKLIIFLNENNVPVQLTSISAPEHKFEGLTQIFQKAYEHEQHISESINNIVDHAIKSKDHATFNFLQWYVAEQHEEEVLFKDILDKIELIGNENHGLYLADQYVKGIAKSRKSGS

SEQ ID NO: 166 - protein, 1503 aa, synthetic construct
NITNRCPFDKVFNATRFPNVYAWERTKISDCVADYTVLYNSTSFSTFKCYGVSPSKLIDLCFTSVYADTFLIRSSEVRQVAPGETGVIADYNYKLPDDFTGCVIAWNTAKHDTGNYYYRSHRKTKLKPFERDLSSDDGNGVYTLSTYDFNPNVPVAYQATRVVVLSFELLNAPATVCGPGSGGSGSSQCVNLTTRTQLPPAYTNSFTRGVYYPDKVFRSSVLHSTQDLFLPFFSNVTWFHAIHVSGTNGTKRFDNPVLPFNDGVYFASTEKSNIIRGWIFGTTLDSKTQSLLIVNNATNVVIKVCEFQFCNDPFLGVYYHKNNKSWMESEFRVYSSANNCTFEYVSQPFLMDLEGKQGNFKNLREFVFKNIDGYFKIYSKHTPINLVRDLPQGFSALEPLVDLPIGINITRFQTLLALHRSYLTPGDSSSGWTAGAAAYYVGYLQPRTFLLKYNENGTITDAVDCALDPLSETKCTLKSFTVEKGIYQTSNFRVQPTESIVRFPNITNLCPFGEVFNATRFASVYAWNRKRISNCVADYSVLYNSASFSTFKCYGVSPTKLNDLCFTNVYADSFVIRGDEVRQIAPGQTGKIADYNYKLPDDFTGCVIAWNSNNLDSKVGGNYNYLYRLFRKSNLKPFERDISTEIYQAGSTPCNGVEGFNCYFPLQSYGFQPTNGVGYQPYRVVVLSFELLHAPATVCGPKKSTNLVKNKCVNFNFNGLTGTGVLTESNKKFLPFQQFGRDIADTTDAVRDPQTLEILDITPCSFGGVSVITPGTNTSNQVAVLYQDVNCTEVPVAIHADQLTPTWRVYSTGSNVFQTRAGCLIGAEHVNNSYECDIPIGAGICASYQTQTNSPGSASSVASQSIIAYTMSLGAENSVAYSNNSIAIPTNFTISVTTEILPVSMTKTSVDCTMYICGDSTECSNLLLQYGSFCTQLNRALTGIAVEQDKNTQEVFAQVKQIYKTPPIKDFGGFNFSQILPDPSKPSKRSFIEDLLFNKVTLADAGFIKQYGDCLGDIAARDLICAQKFNGLTVLPPLLTDEMIAQYTSALLAGTITSGWTFGAGAALQIPFAMQMAYRFNGIGVTQNVLYENQKLIANQFNSAIGKIQDSLSSTASALGKLQDVVNQNAQALNTLVKQLSSNFGAISSVLNDILSRLDPPEAEVQIDRLITGRLQSLQTYVTQQLIRAAEIRASANLAATKMSECVLGQSKRVDFCGKGYHLMSFPQSAPHGVVFLHVTYVPAQEKNFTTAPAICHDGKAHFPREGVFVSNGTHWFVTQRNFYEPQIITTDNTFVSGNCDVVIGIVNNTVYDPLQSELDSIKEELDKIHKNGSGGSGDIIKLLNEQVNKEMQSSNLYMSMSSWCYTHSLDGAGLFLFDHAAEEYEHAKKLIIFLNENNVPVQLTSISAPEHKFEGLTQIFQKAYEHEQHISESINNIVDHAIKSKDHATFNFLQWYVAEQHEEEVLFKDILDKIELIGNENHGLYLADQYVKGIAKSRKSGS

SEQ ID NO: 167 - protein, 1518 aa, synthetic construct
NVTQLCPFSDVFNRTMFPSVYAWERMSIRDCVADYAVLYNSSISFSTFECYGVSPTKLNDLCFSSVYADYFVVRGDDVKQIAPGKTGVIADYNYKLPDDFVGCVLAWNSRHVDNKQGFYYRLFRHGKIKPYQRDMSRELYSPSGTPCTVVGFNCYDPLAHYAFASPGIGIGYQPFRVVVLSFQLLNAPATVCGPGSGGSGSSQCVNLTTRTQLPPAYTNSFTRGVYYPDKVFRSSVLHSTQDLFLPFFSNVTWFHAIHVSGTNGTKRFDNPVLPFNDGVYFASTEKSNIIRGWIFGTTLDSKTQSLLIVNNATNVVIKVCEFQFCNDPFLGVYYHKNNKSWMESEFRVYSSANNCTFEYVSQPFLMDLEGKQGNFKNLREFVFKNIDGYFKIYSKHTPINLVRDLPQGFSALEPLVDLPIGINITRFQTLLALHRSYLTPGDSSSGWTAGAAAYYVGYLQPRTFLLKYNENGTITDAVDCALDPLSETKCTLKSFTVEKGIYQTSNFRVQPTESIVRFPNITNLCPFGEVFNATRFASVYAWNRKRISNCVADYSVLYNSASFSTFKCYGVSPTKLNDLCFTNVYADSFVIRGDEVRQIAPGQTGKIADYNYKLPDDFTGCVIAWNSNNLDSKVGGNYNYLYRLFRKSNLKPFERDISTEIYQAGSTPCNGVEGFNCYFPLQSYGFQPTNGVGYQPYRVVVLSFELLHAPATVCGPKKSTNLVKNKCVNFNFNGLTGTGVLTESNKKFLPFQQFGRDIADTTDAVRDPQTLEILDITPCSFGGVSVITPGTNTSNQVAVLYQDVNCTEVPVAIHADQLTPTWRVYSTGSNVFQTRAGCLIGAEHVNNSYECDIPIGAGICASYQTQTNSPGSASSVASQSIIAYTMSLGAENSVAYSNNSIAIPTNFTISVTTEILPVSMTKTSVDCTMYICGDSTECSNLLLQYGSFCTQLNRALTGIAVEQDKNTQEVFAQVKQIYKTPPIKDFGGFNFSQILPDPSKPSKRSFIEDLLFNKVTLADAGFIKQYGDCLGDIAARDLICAQKFNGLTVLPPLLTDEMIAQYTSALLAGTITSGWTFGAGAALQIPFAMQMAYRFNGIGVTQNVLYENQKLIANQFNSAIGKIQDSLSSTASALGKLQDVVNQNAQALNTLVKQLSSNFGAISSVLNDILSRLDPPEAEVQIDRLITGRLQSLQTYVTQQLIRAAEIRASANLAATKMSECVLGQSKRVDFCGKGYHLMSFPQSAPHGVVFLHVTYVPAQEKNFTTAPAICHDGKAHFPREGVFVSNGTHWFVTQRNFYEPQIITTDNTFVSGNCDVVIGIVNNTVYDPLQSELDSIKEELDKIHKNGSGGSGDIIKLLNEQVNKEMQSSNLYMSMSSWCYTHSLDGAGLFLFDHAAEEYEHAKKLIIFLNENNVPVQLTSISAPEHKFEGLTQIFQKAYEHEQHISESINNIVDHAIKSKDHATFNFLQWYVAEQHEEEVLFKDILDKIELIGNENHGLYLADQYVKGIAKSRKSGS

SEQ ID NO: 168 - protein, 1520 aa, synthetic construct
NITNLCPFDEVFNATRFPSVYAWERKKISNCVADYSVLYNSTSFSTFKCYGVSPSKLNDLCFTSVYADSFVIRGDEVRQIAPGQTGVIADYNYKLPDDFTGCVIAWNTANQDSGEGGNPNYYYRSSRKSKLKPFERDLSSDEYNVGSQPCNRMGPNCYRTLSTYDFYPTVGVGYQPYRVVVLSFELLNAPATVCGPGSGGSGSSQCVNLTTRTQLPPAYTNSFTRGVYYPDKVFRSSVLHSTQDLFLPFFSNVTWFHAIHVSGTNGTKRFDNPVLPFNDGVYFASTEKSNIIRGWIFGTTLDSKTQSLLIVNNATNVVIKVCEFQFCNDPFLGVYYHKNNKSWMESEFRVYSSANNCTFEYVSQPFLMDLEGKQGNFKNLREFVFKNIDGYFKIYSKHTPINLVRDLPQGFSALEPLVDLPIGINITRFQTLLALHRSYLTPGDSSSGWTAGAAAYYVGYLQPRTFLLKYNENGTITDAVDCALDPLSETKCTLKSFTVEKGIYQTSNFRVQPTESIVRFPNITNLCPFGEVFNATRFASVYAWNRKRISNCVADYSVLYNSASFSTFKCYGVSPTKLNDLCFTNVYADSFVIRGDEVRQIAPGQTGKIADYNYKLPDDFTGCVIAWNSNNLDSKVGGNYNYLYRLFRKSNLKPFERDISTEIYQAGSTPCNGVEGFNCYFPLQSYGFQPTNGVGYQPYRVVVLSFELLHAPATVCGPKKSTNLVKNKCVNFNFNGLTGTGVLTESNKKFLPFQQFGRDIADTTDAVRDPQTLEILDITPCSFGGVSVITPGTNTSNQVAVLYQDVNCTEVPVAIHADQLTPTWRVYSTGSNVFQTRAGCLIGAEHVNNSYECDIPIGAGICASYQTQTNSPGSASSVASQSIIAYTMSLGAENSVAYSNNSIAIPTNFTISVTTEILPVSMTKTSVDCTMYICGDSTECSNLLLQYGSFCTQLNRALTGIAVEQDKNTQEVFAQVKQIYKTPPIKDFGGFNFSQILPDPSKPSKRSFIEDLLFNKVTLADAGFIKQYGDCLGDIAARDLICAQKFNGLTVLPPLLTDEMIAQYTSALLAGTITSGWTFGAGAALQIPFAMQMAYRFNGIGVTQNVLYENQKLIANQFNSAIGKIQDSLSSTASALGKLQDVVNQNAQALNTLVKQLSSNFGAISSVLNDILSRLDPPEAEVQIDRLITGRLQSLQTYVTQQLIRAAEIRASANLAATKMSECVLGQSKRVDFCGKGYHLMSFPQSAPHGVVFLHVTYVPAQEKNFTTAPAICHDGKAHFPREGVFVSNGTHWFVTQRNFYEPQIITTDNTFVSGNCDVVIGIVNNTVYDPLQSELDSIKEELDKIHKNGSGGSGDIIKLLNEQVNKEMQSSNLYMSMSSWCYTHSLDGAGLFLFDHAAEEYEHAKKLIIFLNENNVPVQLTSISAPEHKFEGLTQIFQKAYEHEQHISESINNIVDHAIKSKDHATFNFLQWYVAEQHEEEVLFKDILDKIELIGNENHGLYLADQYVKGIAKSRKSGS

SEQ ID NO: 169 - protein, 1607 aa, synthetic construct
NLPDCNIEEWLTAKSVPSPLNWERKTFSNCNFNLSSLLRFVQADSFSCNNIDASKVYGMCFGSISVDKFAIPNSRQVDLQLGNSGFLQSFNYKIDTTATSCQLYYSLPANNVTINNYNPSSWNRRYGFNDDTVFKPRPAGVLTNHDVVYSQQCFKVPNTFCPCKNNGSCVSSGKGTTNGSGTCPAGTNYRTCENTTWCACSCTPDPITASGPRKCPQKKSLVGVGEHCSGLGVDSDYCGNVSCLCSTDAFLGWSADSCLVNDRCNIFANIILNGINSGTTCSTGSGGSGSSQCVNLTTRTQLPPAYTNSFTRGVYYPDKVFRSSVLHSTQDLFLPFFSNVTWFHAIHVSGTNGTKRFDNPVLPFNDGVYFASTEKSNIIRGWIFGTTLDSKTQSLLIVNNATNVVIKVCEFQFCNDPFLGVYYHKNNKSWMESEFRVYSSANNCTFEYVSQPFLMDLEGKQGNFKNLREFVFKNIDGYFKIYSKHTPINLVRDLPQGFSALEPLVDLPIGINITRFQTLLALHRSYLTPGDSSSGWTAGAAAYYVGYLQPRTFLLKYNENGTITDAVDCALDPLSETKCTLKSFTVEKGIYQTSNFRVQPTESIVRFPNITNLCPFGEVFNATRFASVYAWNRKRISNCVADYSVLYNSASFSTFKCYGVSPTKLNDLCFTNVYADSFVIRGDEVRQIAPGQTGKIADYNYKLPDDFTGCVIAWNSNNLDSKVGGNYNYLYRLFRKSNLKPFERDISTEIYQAGSTPCNGVEGFNCYFPLQSYGFQPTNGVGYQPYRVVVLSFELLHAPATVCGPKKSTNLVKNKCVNFNFNGLTGTGVLTESNKKFLPFQQFGRDIADTTDAVRDPQTLEILDITPCSFGGVSVITPGTNTSNQVAVLYQDVNCTEVPVAIHADQLTPTWRVYSTGSNVFQTRAGCLIGAEHVNNSYECDIPIGAGICASYQTQTNSPGSASSVASQSIIAYTMSLGAENSVAYSNNSIAIPTNFTISVTTEILPVSMTKTSVDCTMYICGDSTECSNLLLQYGSFCTQLNRALTGIAVEQDKNTQEVFAQVKQIYKTPPIKDFGGFNFSQILPDPSKPSKRSFIEDLLFNKVTLADAGFIKQYGDCLGDIAARDLICAQKFNGLTVLPPLLTDEMIAQYTSALLAGTITSGWTFGAGAALQIPFAMQMAYRFNGIGVTQNVLYENQKLIANQFNSAIGKIQDSLSSTASALGKLQDVVNQNAQALNTLVKQLSSNFGAISSVLNDILSRLDPPEAEVQIDRLITGRLQSLQTYVTQQLIRAAEIRASANLAATKMSECVLGQSKRVDFCGKGYHLMSFPQSAPHGVVFLHVTYVPAQEKNFTTAPAICHDGKAHFPREGVFVSNGTHWFVTQRNFYEPQIITTDNTFVSGNCDVVIGIVNNTVYDPLQSELDSIKEELDKIHKNGSGGSGDIIKLLNEQVNKEMQSSNLYMSMSSWCYTHSLDGAGLFLFDHAAEEYEHAKKLIIFLNENNVPVQLTSISAPEHKFEGLTQIFQKAYEHEQHISESINNIVDHAIKSKDHATFNFLQWYVAEQHEEEVLFKDILDKIELIGNENHGLYLADQYVKGIAKSRKSGS

SEQ ID NO: 170 - protein, 1533 aa, synthetic construct
QGVECDFSKLFKAAAPQIYNFSRLVFTNCNYNLTKLLSLFQVDEFSCHQISPSALASGCYSSLTVDYFAYPLSMKSYLQIGSAGEISQFNYKQDFSNPTCRILASVPANVSITKPDKYIYISQCYSLSAYSDVDVPHYVNPGQYTSIPCLYLTSSGFDEDGQYFRYNLTQFEGQNYLVATGVTVSMTDNLQMVFVITVQYGTDTNSVCPGSGGSGSSQCVNLTTRTQLPPAYTNSFTRGVYYPDKVFRSSVLHSTQDLFLPFFSNVTWFHAIHVSGTNGTKRFDNPVLPFNDGVYFASTEKSNIIRGWIFGTTLDSKTQSLLIVNNATNVVIKVCEFQFCNDPFLGVYYHKNNKSWMESEFRVYSSANNCTFEYVSQPFLMDLEGKQGNFKNLREFVFKNIDGYFKIYSKHTPINLVRDLPQGFSALEPLVDLPIGINITRFQTLLALHRSYLTPGDSSSGWTAGAAAYYVGYLQPRTFLLKYNENGTITDAVDCALDPLSETKCTLKSFTVEKGIYQTSNFRVQPTESIVRFPNITNLCPFGEVFNATRFASVYAWNRKRISNCVADYSVLYNSASFSTFKCYGVSPTKLNDLCFTNVYADSFVIRGDEVRQIAPGQTGKIADYNYKLPDDFTGCVIAWNSNNLDSKVGGNYNYLYRLFRKSNLKPFERDISTEIYQAGSTPCNGVEGFNCYFPLQSYGFQPTNGVGYQPYRVVVLSFELLHAPATVCGPKKSTNLVKNKCVNFNFNGLTGTGVLTESNKKFLPFQQFGRDIADTTDAVRDPQTLEILDITPCSFGGVSVITPGTNTSNQVAVLYQDVNCTEVPVAIHADQLTPTWRVYSTGSNVFQTRAGCLIGAEHVNNSYECDIPIGAGICASYQTQTNSPGSASSVASQSIIAYTMSLGAENSVAYSNNSIAIPTNFTISVTTEILPVSMTKTSVDCTMYICGDSTECSNLLLQYGSFCTQLNRALTGIAVEQDKNTQEVFAQVKQIYKTPPIKDFGGFNFSQILPDPSKPSKRSFIEDLLFNKVTLADAGFIKQYGDCLGDIAARDLICAQKFNGLTVLPPLLTDEMIAQYTSALLAGTITSGWTFGAGAALQIPFAMQMAYRFNGIGVTQNVLYENQKLIANQFNSAIGKIQDSLSSTASALGKLQDVVNQNAQALNTLVKQLSSNFGAISSVLNDILSRLDPPEAEVQIDRLITGRLQSLQTYVTQQLIRAAEIRASANLAATKMSECVLGQSKRVDFCGKGYHLMSFPQSAPHGVVFLHVTYVPAQEKNFTTAPAICHDGKAHFPREGVFVSNGTHWFVTQRNFYEPQIITTDNTFVSGNCDVVIGIVNNTVYDPLQSELDSIKEELDKIHKNGSGGSGDIIKLLNEQVNKEMQSSNLYMSMSSWCYTHSLDGAGLFLFDHAAEEYEHAKKLIIFLNENNVPVQLTSISAPEHKFEGLTQIFQKAYEHEQHISESINNIVDHAIKSKDHATFNFLQWYVAEQHEEEVLFKDILDKIELIGNENHGLYLADQYVKGIAKSRKSGS

SEQ ID NO: 171 - protein, 1532 aa, synthetic construct
ELTECDLDVLFKNDAPIIANYSRRVFTNCNYNLTKLLSLVQVDEFVCHKTTPEALATGCYSSLTVDWFALPFSMKSTLAIGSAEAISMFNYNQDYSNPTCRIHAAVTANVSTALNFTANANYAYISRCQGVDGKPILLQPGQMTNIACRSGVLARPSDADYFGYSFQGRNYYLGRKSYKPKTDEGDVQMVYVITPKYDKGPDTVCPLKGSGGSGSSQCVNLTTRTQLPPAYTNSFTRGVYYPDKVFRSSVLHSTQDLFLPFFSNVTWFHAIHVSGTNGTKRFDNPVLPFNDGVYFASTEKSNIIRGWIFGTTLDSKTQSLLIVNNATNVVIKVCEFQFCNDPFLGVYYHKNNKSWMESEFRVYSSANNCTFEYVSQPFLMDLEGKQGNFKNLREFVFKNIDGYFKIYSKHTPINLVRDLPQGFSALEPLVDLPIGINITRFQTLLALHRSYLTPGDSSSGWTAGAAAYYVGYLQPRTFLLKYNENGTITDAVDCALDPLSETKCTLKSFTVEKGIYQTSNFRVQPTESIVRFPNITNLCPFGEVFNATRFASVYAWNRKRISNCVADYSVLYNSASFSTFKCYGVSPTKLNDLCFTNVYADSFVIRGDEVRQIAPGQTGKIADYNYKLPDDFTGCVIAWNSNNLDSKVGGNYNYLYRLFRKSNLKPFERDISTEIYQAGSTPCNGVEGFNCYFPLQSYGFQPTNGVGYQPYRVVVLSFELLHAPATVCGPKKSTNLVKNKCVNFNFNGLTGTGVLTESNKKFLPFQQFGRDIADTTDAVRDPQTLEILDITPCSFGGVSVITPGTNTSNQVAVLYQDVNCTEVPVAIHADQLTPTWRVYSTGSNVFQTRAGCLIGAEHVNNSYECDIPIGAGICASYQTQTNSPGSASSVASQSIIAYTMSLGAENSVAYSNNSIAIPTNFTISVTTEILPVSMTKTSVDCTMYICGDSTECSNLLLQYGSFCTQLNRALTGIAVEQDKNTQEVFAQVKQIYKTPPIKDFGGFNFSQILPDPSKPSKRSFIEDLLFNKVTLADAGFIKQYGDCLGDIAARDLICAQKFNGLTVLPPLLTDEMIAQYTSALLAGTITSGWTFGAGAALQIPFAMQMAYRFNGIGVTQNVLYENQKLIANQFNSAIGKIQDSLSSTASALGKLQDVVNQNAQALNTLVKQLSSNFGAISSVLNDILSRLDPPEAEVQIDRLITGRLQSLQTYVTQQLIRAAEIRASANLAATKMSECVLGQSKRVDFCGKGYHLMSFPQSAPHGVVFLHVTYVPAQEKNFTTAPAICHDGKAHFPREGVFVSNGTHWFVTQRNFYEPQIITTDNTFVSGNCDVVIGIVNNTVYDPLQSELDSIKEELDKIHKNGSGGSGDIIKLLNEQVNKEMQSSNLYMSMSSWCYTHSLDGAGLFLFDHAAEEYEHAKKLIIFLNENNVPVQLTSISAPEHKFEGLTQIFQKAYEHEQHISESINNIVDHAIKSKDHATFNFLQWYVAEQHEEEVLFKDILDKIELIGNENHGLYLADQYVKGIAKSRKSGS

SEQ ID NO: 172 - protein, 1528 aa, synthetic construct
VYPDCNFTELFRERAPTIMQYKREVFTRCNYNLSLLLSLVQVDEFVCDKITPEALATGCYSSLTVDWFAFPYAWKSYLAIGSADRIVRFNYNQDYSNPSCRIHSKVNSSIGISYAGAYSYITNCNYGATNKDDVVKPGGRASQQCITGALNSPTTGQLWAYNFGGVPYRVSRLTYTDHLSDPLDMVYVITVKYEPGAETVCPKQGSGGSGSSQCVNLTTRTQLPPAYTNSFTRGVYYPDKVFRSSVLHSTQDLFLPFFSNVTWFHAIHVSGTNGTKRFDNPVLPFNDGVYFASTEKSNIIRGWIFGTTLDSKTQSLLIVNNATNVVIKVCEFQFCNDPFLGVYYHKNNKSWMESEFRVYSSANNCTFEYVSQPFLMDLEGKQGNFKNLREFVFKNIDGYFKIYSKHTPINLVRDLPQGFSALEPLVDLPIGINITRFQTLLALHRSYLTPGDSSSGWTAGAAAYYVGYLQPRTFLLKYNENGTITDAVDCALDPLSETKCTLKSFTVEKGIYQTSNFRVQPTESIVRFPNITNLCPFGEVFNATRFASVYAWNRKRISNCVADYSVLYNSASFSTFKCYGVSPTKLNDLCFTNVYADSFVIRGDEVRQIAPGQTGKIADYNYKLPDDFTGCVIAWNSNNLDSKVGGNYNYLYRLFRKSNLKPFERDISTEIYQAGSTPCNGVEGFNCYFPLQSYGFQPTNGVGYQPYRVVVLSFELLHAPATVCGPKKSTNLVKNKCVNFNFNGLTGTGVLTESNKKFLPFQQFGRDIADTTDAVRDPQTLEILDITPCSFGGVSVITPGTNTSNQVAVLYQDVNCTEVPVAIHADQLTPTWRVYSTGSNVFQTRAGCLIGAEHVNNSYECDIPIGAGICASYQTQTNSPGSASSVASQSIIAYTMSLGAENSVAYSNNSIAIPTNFTISVTTEILPVSMTKTSVDCTMYICGDSTECSNLLLQYGSFCTQLNRALTGIAVEQDKNTQEVFAQVKQIYKTPPIKDFGGFNFSQILPDPSKPSKRSFIEDLLFNKVTLADAGFIKQYGDCLGDIAARDLICAQKFNGLTVLPPLLTDEMIAQYTSALLAGTITSGWTFGAGAALQIPFAMQMAYRFNGIGVTQNVLYENQKLIANQFNSAIGKIQDSLSSTASALGKLQDVVNQNAQALNTLVKQLSSNFGAISSVLNDILSRLDPPEAEVQIDRLITGRLQSLQTYVTQQLIRAAEIRASANLAATKMSECVLGQSKRVDFCGKGYHLMSFPQSAPHGVVFLHVTYVPAQEKNFTTAPAICHDGKAHFPREGVFVSNGTHWFVTQRNFYEPQIITTDNTFVSGNCDVVIGIVNNTVYDPLQSELDSIKEELDKIHKNGSGGSGDIIKLLNEQVNKEMQSSNLYMSMSSWCYTHSLDGAGLFLFDHAAEEYEHAKKLIIFLNENNVPVQLTSISAPEHKFEGLTQIFQKAYEHEQHISESINNIVDHAIKSKDHATFNFLQWYVAEQHEEEVLFKDILDKIELIGNENHGLYLADQYVKGIAKSRKSGS

SEQ ID NO: 173 - protein, 1534 aa, synthetic construct
QATECDFSPMLTGVAPQVYNFKRLVFSNCNYNLTKLLSLFAVDEFSCNGISPDAIARGCYSTLTVDYFAYPLSMKSYIRPGSAGNIPLYNYKQSFANPTCRVMASVPANVTITKPDAYGYISKCSRLTGANQDVETPLYINPGEYSICRDFSPGGFSEDGQVFKRTLTQFEGGGLLIGVGTRVPMTDNLQMSFIIFVQYGTGTDSVCPMLGSGGSGSSQCVNLTTRTQLPPAYTNSFTRGVYYPDKVFRSSVLHSTQDLFLPFFSNVTWFHAIHVSGTNGTKRFDNPVLPFNDGVYFASTEKSNIIRGWIFGTTLDSKTQSLLIVNNATNVVIKVCEFQFCNDPFLGVYYHKNNKSWMESEFRVYSSANNCTFEYVSQPFLMDLEGKQGNFKNLREFVFKNIDGYFKIYSKHTPINLVRDLPQGFSALEPLVDLPIGINITRFQTLLALHRSYLTPGDSSSGWTAGAAAYYVGYLQPRTFLLKYNENGTITDAVDCALDPLSETKCTLKSFTVEKGIYQTSNFRVQPTESIVRFPNITNLCPFGEVFNATRFASVYAWNRKRISNCVADYSVLYNSASFSTFKCYGVSPTKLNDLCFTNVYADSFVIRGDEVRQIAPGQTGKIADYNYKLPDDFTGCVIAWNSNNLDSKVGGNYNYLYRLFRKSNLKPFERDISTEIYQAGSTPCNGVEGFNCYFPLQSYGFQPTNGVGYQPYRVVVLSFELLHAPATVCGPKKSTNLVKNKCVNFNFNGLTGTGVLTESNKKFLPFQQFGRDIADTTDAVRDPQTLEILDITPCSFGGVSVITPGTNTSNQVAVLYQDVNCTEVPVAIHADQLTPTWRVYSTGSNVFQTRAGCLIGAEHVNNSYECDIPIGAGICASYQTQTNSPGSASSVASQSIIAYTMSLGAENSVAYSNNSIAIPTNFTISVTTEILPVSMTKTSVDCTMYICGDSTECSNLLLQYGSFCTQLNRALTGIAVEQDKNTQEVFAQVKQIYKTPPIKDFGGFNFSQILPDPSKPSKRSFIEDLLFNKVTLADAGFIKQYGDCLGDIAARDLICAQKFNGLTVLPPLLTDEMIAQYTSALLAGTITSGWTFGAGAALQIPFAMQMAYRFNGIGVTQNVLYENQKLIANQFNSAIGKIQDSLSSTASALGKLQDVVNQNAQALNTLVKQLSSNFGAISSVLNDILSRLDPPEAEVQIDRLITGRLQSLQTYVTQQLIRAAEIRASANLAATKMSECVLGQSKRVDFCGKGYHLMSFPQSAPHGVVFLHVTYVPAQEKNFTTAPAICHDGKAHFPREGVFVSNGTHWFVTQRNFYEPQIITTDNTFVSGNCDVVIGIVNNTVYDPLQSELDSIKEELDKIHKNGSGGSGDIIKLLNEQVNKEMQSSNLYMSMSSWCYTHSLDGAGLFLFDHAAEEYEHAKKLIIFLNENNVPVQLTSISAPEHKFEGLTQIFQKAYEHEQHISESINNIVDHAIKSKDHATFNFLQWYVAEQHEEEVLFKDILDKIELIGNENHGLYLADQYVKGIAKSRKSGS

SEQ ID NO: 174 - protein, 1525 aa, synthetic construct
QGVECDFSKLFKAAPPQIYNFSRLVFTNCNYNLTKLLSLFHVSEFSCHQVSPSALASGCYSSLTVDYFAYPLYLASYLQQGSTGEIAQYNYKQDFSNPTCRILASVPANVSIPKPDKYIWLSQCYSFSAYSGDIPHYVQPGQYTPCLYLTSSGFDKSYQTNRDMQNKMAATGVTSSMTDNLQMAFVISVQYGTDTNSVCPMGSGGSGSSQCVNLTTRTQLPPAYTNSFTRGVYYPDKVFRSSVLHSTQDLFLPFFSNVTWFHAIHVSGTNGTKRFDNPVLPFNDGVYFASTEKSNIIRGWIFGTTLDSKTQSLLIVNNATNVVIKVCEFQFCNDPFLGVYYHKNNKSWMESEFRVYSSANNCTFEYVSQPFLMDLEGKQGNFKNLREFVFKNIDGYFKIYSKHTPINLVRDLPQGFSALEPLVDLPIGINITRFQTLLALHRSYLTPGDSSSGWTAGAAAYYVGYLQPRTFLLKYNENGTITDAVDCALDPLSETKCTLKSFTVEKGIYQTSNFRVQPTESIVRFPNITNLCPFGEVFNATRFASVYAWNRKRISNCVADYSVLYNSASFSTFKCYGVSPTKLNDLCFTNVYADSFVIRGDEVRQIAPGQTGKIADYNYKLPDDFTGCVIAWNSNNLDSKVGGNYNYLYRLFRKSNLKPFERDISTEIYQAGSTPCNGVEGFNCYFPLQSYGFQPTNGVGYQPYRVVVLSFELLHAPATVCGPKKSTNLVKNKCVNFNFNGLTGTGVLTESNKKFLPFQQFGRDIADTTDAVRDPQTLEILDITPCSFGGVSVITPGTNTSNQVAVLYQDVNCTEVPVAIHADQLTPTWRVYSTGSNVFQTRAGCLIGAEHVNNSYECDIPIGAGICASYQTQTNSPGSASSVASQSIIAYTMSLGAENSVAYSNNSIAIPTNFTISVTTEILPVSMTKTSVDCTMYICGDSTECSNLLLQYGSFCTQLNRALTGIAVEQDKNTQEVFAQVKQIYKTPPIKDFGGFNFSQILPDPSKPSKRSFIEDLLFNKVTLADAGFIKQYGDCLGDIAARDLICAQKFNGLTVLPPLLTDEMIAQYTSALLAGTITSGWTFGAGAALQIPFAMQMAYRFNGIGVTQNVLYENQKLIANQFNSAIGKIQDSLSSTASALGKLQDVVNQNAQALNTLVKQLSSNFGAISSVLNDILSRLDPPEAEVQIDRLITGRLQSLQTYVTQQLIRAAEIRASANLAATKMSECVLGQSKRVDFCGKGYHLMSFPQSAPHGVVFLHVTYVPAQEKNFTTAPAICHDGKAHFPREGVFVSNGTHWFVTQRNFYEPQIITTDNTFVSGNCDVVIGIVNNTVYDPLQSELDSIKEELDKIHKNGSGGSGDIIKLLNEQVNKEMQSSNLYMSMSSWCYTHSLDGAGLFLFDHAAEEYEHAKKLIIFLNENNVPVQLTSISAPEHKFEGLTQIFQKAYEHEQHISESINNIVDHAIKSKDHATFNFLQWYVAEQHEEEVLFKDILDKIELIGNENHGLYLADQYVKGIAKSRKSGS

SEQ ID NO: 175 - protein, 1525 aa, synthetic construct
QGVECDFSKLFKAAPPQIYNFSRLVFTNCNYNLTKLLSLFHVSEFSCHQVSPSALASGCYSSLTVDYFAYPLYLASYLQQGSTGEIAQYNYKQDFSNPTCRILASVPANVSIPKPDKYIWLSQCYSFSAYSGDVPHYVLPGQYTPCLYLTSSGFDNSYQTNRDFQNKMAATGVISSMTDNLQMAFVISVQYGTDTNSVCPMGSGGSGSSQCVNLTTRTQLPPAYTNSFTRGVYYPDKVFRSSVLHSTQDLFLPFFSNVTWFHAIHVSGTNGTKRFDNPVLPFNDGVYFASTEKSNIIRGWIFGTTLDSKTQSLLIVNNATNVVIKVCEFQFCNDPFLGVYYHKNNKSWMESEFRVYSSANNCTFEYVSQPFLMDLEGKQGNFKNLREFVFKNIDGYFKIYSKHTPINLVRDLPQGFSALEPLVDLPIGINITRFQTLLALHRSYLTPGDSSSGWTAGAAAYYVGYLQPRTFLLKYNENGTITDAVDCALDPLSETKCTLKSFTVEKGIYQTSNFRVQPTESIVRFPNITNLCPFGEVFNATRFASVYAWNRKRISNCVADYSVLYNSASFSTFKCYGVSPTKLNDLCFTNVYADSFVIRGDEVRQIAPGQTGKIADYNYKLPDDFTGCVIAWNSNNLDSKVGGNYNYLYRLFRKSNLKPFERDISTEIYQAGSTPCNGVEGFNCYFPLQSYGFQPTNGVGYQPYRVVVLSFELLHAPATVCGPKKSTNLVKNKCVNFNFNGLTGTGVLTESNKKFLPFQQFGRDIADTTDAVRDPQTLEILDITPCSFGGVSVITPGTNTSNQVAVLYQDVNCTEVPVAIHADQLTPTWRVYSTGSNVFQTRAGCLIGAEHVNNSYECDIPIGAGICASYQTQTNSPGSASSVASQSIIAYTMSLGAENSVAYSNNSIAIPTNFTISVTTEILPVSMTKTSVDCTMYICGDSTECSNLLLQYGSFCTQLNRALTGIAVEQDKNTQEVFAQVKQIYKTPPIKDFGGFNFSQILPDPSKPSKRSFIEDLLFNKVTLADAGFIKQYGDCLGDIAARDLICAQKFNGLTVLPPLLTDEMIAQYTSALLAGTITSGWTFGAGAALQIPFAMQMAYRFNGIGVTQNVLYENQKLIANQFNSAIGKIQDSLSSTASALGKLQDVVNQNAQALNTLVKQLSSNFGAISSVLNDILSRLDPPEAEVQIDRLITGRLQSLQTYVTQQLIRAAEIRASANLAATKMSECVLGQSKRVDFCGKGYHLMSFPQSAPHGVVFLHVTYVPAQEKNFTTAPAICHDGKAHFPREGVFVSNGTHWFVTQRNFYEPQIITTDNTFVSGNCDVVIGIVNNTVYDPLQSELDSIKEELDKIHKNGSGGSGDIIKLLNEQVNKEMQSSNLYMSMSSWCYTHSLDGAGLFLFDHAAEEYEHAKKLIIFLNENNVPVQLTSISAPEHKFEGLTQIFQKAYEHEQHISESINNIVDHAIKSKDHATFNFLQWYVAEQHEEEVLFKDILDKIELIGNENHGLYLADQYVKGIAKSRKSGS

SEQ ID NO: 176 - protein, 1523 aa, synthetic construct
TTQECDFTPMLTGTPPPIYNFKRLVFTNCNYNLTKLLSLFQVSEFSCHQVSPSSLATGCYSSLTVDYFAYSTDMSSYLQPGSAGAIVQFNYKQDFSNPTCRVLATVPQNLTTITKPSNYAYLTECYKTSAYGKNYLYNAPGAYTPCLSLASRGFSTKYQSHSDGELTTTGYIYPVTGNLQMAFIISVQYGTDTNSVCPMGSGGSGSSQCVNLTTRTQLPPAYTNSFTRGVYYPDKVFRSSVLHSTQDLFLPFFSNVTWFHAIHVSGTNGTKRFDNPVLPFNDGVYFASTEKSNIIRGWIFGTTLDSKTQSLLIVNNATNVVIKVCEFQFCNDPFLGVYYHKNNKSWMESEFRVYSSANNCTFEYVSQPFLMDLEGKQGNFKNLREFVFKNIDGYFKIYSKHTPINLVRDLPQGFSALEPLVDLPIGINITRFQTLLALHRSYLTPGDSSSGWTAGAAAYYVGYLQPRTFLLKYNENGTITDAVDCALDPLSETKCTLKSFTVEKGIYQTSNFRVQPTESIVRFPNITNLCPFGEVFNATRFASVYAWNRKRISNCVADYSVLYNSASFSTFKCYGVSPTKLNDLCFTNVYADSFVIRGDEVRQIAPGQTGKIADYNYKLPDDFTGCVIAWNSNNLDSKVGGNYNYLYRLFRKSNLKPFERDISTEIYQAGSTPCNGVEGFNCYFPLQSYGFQPTNGVGYQPYRVVVLSFELLHAPATVCGPKKSTNLVKNKCVNFNFNGLTGTGVLTESNKKFLPFQQFGRDIADTTDAVRDPQTLEILDITPCSFGGVSVITPGTNTSNQVAVLYQDVNCTEVPVAIHADQLTPTWRVYSTGSNVFQTRAGCLIGAEHVNNSYECDIPIGAGICASYQTQTNSPGSASSVASQSIIAYTMSLGAENSVAYSNNSIAIPTNFTISVTTEILPVSMTKTSVDCTMYICGDSTECSNLLLQYGSFCTQLNRALTGIAVEQDKNTQEVFAQVKQIYKTPPIKDFGGFNFSQILPDPSKPSKRSFIEDLLFNKVTLADAGFIKQYGDCLGDIAARDLICAQKFNGLTVLPPLLTDEMIAQYTSALLAGTITSGWTFGAGAALQIPFAMQMAYRFNGIGVTQNVLYENQKLIANQFNSAIGKIQDSLSSTASALGKLQDVVNQNAQALNTLVKQLSSNFGAISSVLNDILSRLDPPEAEVQIDRLITGRLQSLQTYVTQQLIRAAEIRASANLAATKMSECVLGQSKRVDFCGKGYHLMSFPQSAPHGVVFLHVTYVPAQEKNFTTAPAICHDGKAHFPREGVFVSNGTHWFVTQRNFYEPQIITTDNTFVSGNCDVVIGIVNNTVYDPLQSELDSIKEELDKIHKNGSGGSGDIIKLLNEQVNKEMQSSNLYMSMSSWCYTHSLDGAGLFLFDHAAEEYEHAKKLIIFLNENNVPVQLTSISAPEHKFEGLTQIFQKAYEHEQHISESINNIVDHAIKSKDHATFNFLQWYVAEQHEEEVLFKDILDKIELIGNENHGLYLADQYVKGIAKSRKSGS

SEQ ID NO: 177 - protein, 1520 aa, synthetic construct
NITNLCPFGEVFNATKFPSVYAWERKKISNCVADYSVLYNSTFFSTFKCYGVSATKLNDLCFSNVYADSFVVKGDDVRQIAPGQTGVIADYNYKLPDDFMGCVLAWNTRNIDATSTGNYNYKYRYLRHGKLRPFERDISNVPFSPDGKPCTPPALNCYWPLNDYGFYTTTGIGYQPYRVVVLSFELLNAPATVCGPGSGGGSSSQCVNLTTRTQLPPAYTNSFTRGVYYPDKVFRSSVLHSTQDLFLPFFSNVTWFHAIHVSGTNGTKRFDNPVLPFNDGVYFASTEKSNIIRGWIFGTTLDSKTQSLLIVNNATNVVIKVCEFQFCNDPFLGVYYHKNNKSWMESEFRVYSSANNCTFEYVSQPFLMDLEGKQGNFKNLREFVFKNIDGYFKIYSKHTPINLVRDLPQGFSALEPLVDLPIGINITRFQTLLALHRSYLTPGDSSSGWTAGAAAYYVGYLQPRTFLLKYNENGTITDAVDCALDPLSETKCTLKSFTVEKGIYQTSNFRVQPTESIVRFPNITNLCPFGEVFNATRFASVYAWNRKRISNCVADYSVLYNSASFSTFKCYGVSPTKLNDLCFTNVYADSFVIRGDEVRQIAPGQTGKIADYNYKLPDDFTGCVIAWNSNNLDSKVGGNYNYLYRLFRKSNLKPFERDISTEIYQAGSTPCNGVEGFNCYFPLQSYGFQPTNGVGYQPYRVVVLSFELLHAPATVCGPKKSTNLVKNKCVNFNFNGLTGTGVLTESNKKFLPFQQFGRDIADTTDAVRDPQTLEILDITPCSFGGVSVITPGTNTSNQVAVLYQDVNCTEVPVAIHADQLTPTWRVYSTGSNVFQTRAGCLIGAEHVNNSYECDIPIGAGICASYQTQTNSPGSASSVASQSIIAYTMSLGAENSVAYSNNSIAIPTNFTISVTTEILPVSMTKTSVDCTMYICGDSTECSNLLLQYGSFCTQLNRALTGIAVEQDKNTQEVFAQVKQIYKTPPIKDFGGFNFSQILPDPSKPSKRSFIEDLLFNKVTLADAGFIKQYGDCLGDIAARDLICAQKFNGLTVLPPLLTDEMIAQYTSALLAGTITSGWTFGAGAALQIPFAMQMAYRFNGIGVTQNVLYENQKLIANQFNSAIGKIQDSLSSTASALGKLQDVVNQNAQALNTLVKQLSSNFGAISSVLNDILSRLDPPEAEVQIDRLITGRLQSLQTYVTQQLIRAAEIRASANLAATKMSECVLGQSKRVDFCGKGYHLMSFPQSAPHGVVFLHVTYVPAQEKNFTTAPAICHDGKAHFPREGVFVSNGTHWFVTQRNFYEPQIITTDNTFVSGNCDVVIGIVNNTVYDPLQSELDSIKEELDKIHKNGSGGSGDIIKLLNEQVNKEMQSSNLYMSMSSWCYTHSLDGAGLFLFDHAAEEYEHAKKLIIFLNENNVPVQLTSISAPEHKFEGLTQIFQKAYEHEQHISESINNIVDHAIKSKDHATFNFLQWYVAEQHEEEVLFKDILDKIELIGNENHGLYLADQYVKGIAKSRKSGS

SEQ ID NO: 178 - protein, 1724 aa, synthetic construct
NITNLCPFDEVFNATRFASVYAWNRKRISNCVADYSVLYNFAPFFAFKCYGVSPTKLNDLCFTNVYADSFVIRGNEVSQIAPGQTGNIADYNYKLPDDFTGCVIAWNSNKLDSKVGGNYNYQYRLFRKSNLKPFERDISTEIYQAGNKPCNGVAGFNCYFPLRSYGFRPTYGVGHQPYRVVVLSFELLHAPATVCGPGSGGSGNITNLCPFDEVFNATRFASVYAWNRKRISNCVADYSVLYNFAPFFAFKCYGVSPTKLNDLCFTNVYADSFVIRGNEVSQIAPGQTGNIADYNYKLPDDFTGCVIAWNSNKLDSKVGGNYNYRYRLFRKSNLKPFERDISTEIYQAGNKPCNGVAGVNCYFPLQSYGFRPTYGVGHQPYRVVVLSFELLHAPATVCGPGSGGSGSSQCVNLTTRTQLPPAYTNSFTRGVYYPDKVFRSSVLHSTQDLFLPFFSNVTWFHAIHVSGTNGTKRFDNPVLPFNDGVYFASTEKSNIIRGWIFGTTLDSKTQSLLIVNNATNVVIKVCEFQFCNDPFLGVYYHKNNKSWMESEFRVYSSANNCTFEYVSQPFLMDLEGKQGNFKNLREFVFKNIDGYFKIYSKHTPINLVRDLPQGFSALEPLVDLPIGINITRFQTLLALHRSYLTPGDSSSGWTAGAAAYYVGYLQPRTFLLKYNENGTITDAVDCALDPLSETKCTLKSFTVEKGIYQTSNFRVQPTESIVRFPNITNLCPFGEVFNATRFASVYAWNRKRISNCVADYSVLYNSASFSTFKCYGVSPTKLNDLCFTNVYADSFVIRGDEVRQIAPGQTGKIADYNYKLPDDFTGCVIAWNSNNLDSKVGGNYNYLYRLFRKSNLKPFERDISTEIYQAGSTPCNGVEGFNCYFPLQSYGFQPTNGVGYQPYRVVVLSFELLHAPATVCGPKKSTNLVKNKCVNFNFNGLTGTGVLTESNKKFLPFQQFGRDIADTTDAVRDPQTLEILDITPCSFGGVSVITPGTNTSNQVAVLYQDVNCTEVPVAIHADQLTPTWRVYSTGSNVFQTRAGCLIGAEHVNNSYECDIPIGAGICASYQTQTNSPGSASSVASQSIIAYTMSLGAENSVAYSNNSIAIPTNFTISVTTEILPVSMTKTSVDCTMYICGDSTECSNLLLQYGSFCTQLNRALTGIAVEQDKNTQEVFAQVKQIYKTPPIKDFGGFNFSQILPDPSKPSKRSFIEDLLFNKVTLADAGFIKQYGDCLGDIAARDLICAQKFNGLTVLPPLLTDEMIAQYTSALLAGTITSGWTFGAGAALQIPFAMQMAYRFNGIGVTQNVLYENQKLIANQFNSAIGKIQDSLSSTASALGKLQDVVNQNAQALNTLVKQLSSNFGAISSVLNDILSRLDPPEAEVQIDRLITGRLQSLQTYVTQQLIRAAEIRASANLAATKMSECVLGQSKRVDFCGKGYHLMSFPQSAPHGVVFLHVTYVPAQEKNFTTAPAICHDGKAHFPREGVFVSNGTHWFVTQRNFYEPQIITTDNTFVSGNCDVVIGIVNNTVYDPLQSELDSIKEELDKIHKNGSGGSGDIIKLLNEQVNKEMQSSNLYMSMSSWCYTHSLDGAGLFLFDHAAEEYEHAKKLIIFLNENNVPVQLTSISAPEHKFEGLTQIFQKAYEHEQHISESINNIVDHAIKSKDHATFNFLQWYVAEQHEEEVLFKDILDKIELIGNENHGLYLADQYVKGIAKSRKSGS

SEQ ID NO: 179 - protein, 1720 aa, synthetic construct
NITQLCPFNEVFNITSFPSVYAWERMRITNCVADYSVLYNSSASFSTFQCYGVSPTKLNDLCFSSVYADYFVVKGDDVRQIAPAQTGVIADYNYKLPDDFTGCVIAWNTNSLDSSNEFFYRRFRHGKIKPYGRDLSNVLFNPSGGTCSAEGLNCYKPLASYGFTQSSGIGFQPYRVVVLSFELLNAPATVCGPGSGGSGNITNLCPFDEVFNATRFASVYAWNRKRISNCVADYSVLYNFAPFFAFKCYGVSPTKLNDLCFTNVYADSFVIRGNEVSQIAPGQTGNIADYNYKLPDDFTGCVIAWNSNKLDSKVGGNYNYRYRLFRKSNLKPFERDISTEIYQAGNKPCNGVAGVNCYFPLQSYGFRPTYGVGHQPYRVVVLSFELLHAPATVCGPGSGGSGSSQCVNLTTRTQLPPAYTNSFTRGVYYPDKVFRSSVLHSTQDLFLPFFSNVTWFHAIHVSGTNGTKRFDNPVLPFNDGVYFASTEKSNIIRGWIFGTTLDSKTQSLLIVNNATNVVIKVCEFQFCNDPFLGVYYHKNNKSWMESEFRVYSSANNCTFEYVSQPFLMDLEGKQGNFKNLREFVFKNIDGYFKIYSKHTPINLVRDLPQGFSALEPLVDLPIGINITRFQTLLALHRSYLTPGDSSSGWTAGAAAYYVGYLQPRTFLLKYNENGTITDAVDCALDPLSETKCTLKSFTVEKGIYQTSNFRVQPTESIVRFPNITNLCPFGEVFNATRFASVYAWNRKRISNCVADYSVLYNSASFSTFKCYGVSPTKLNDLCFTNVYADSFVIRGDEVRQIAPGQTGKIADYNYKLPDDFTGCVIAWNSNNLDSKVGGNYNYLYRLFRKSNLKPFERDISTEIYQAGSTPCNGVEGFNCYFPLQSYGFQPTNGVGYQPYRVVVLSFELLHAPATVCGPKKSTNLVKNKCVNFNFNGLTGTGVLTESNKKFLPFQQFGRDIADTTDAVRDPQTLEILDITPCSFGGVSVITPGTNTSNQVAVLYQDVNCTEVPVAIHADQLTPTWRVYSTGSNVFQTRAGCLIGAEHVNNSYECDIPIGAGICASYQTQTNSPGSASSVASQSIIAYTMSLGAENSVAYSNNSIAIPTNFTISVTTEILPVSMTKTSVDCTMYICGDSTECSNLLLQYGSFCTQLNRALTGIAVEQDKNTQEVFAQVKQIYKTPPIKDFGGFNFSQILPDPSKPSKRSFIEDLLFNKVTLADAGFIKQYGDCLGDIAARDLICAQKFNGLTVLPPLLTDEMIAQYTSALLAGTITSGWTFGAGAALQIPFAMQMAYRFNGIGVTQNVLYENQKLIANQFNSAIGKIQDSLSSTASALGKLQDVVNQNAQALNTLVKQLSSNFGAISSVLNDILSRLDPPEAEVQIDRLITGRLQSLQTYVTQQLIRAAEIRASANLAATKMSECVLGQSKRVDFCGKGYHLMSFPQSAPHGVVFLHVTYVPAQEKNFTTAPAICHDGKAHFPREGVFVSNGTHWFVTQRNFYEPQIITTDNTFVSGNCDVVIGIVNNTVYDPLQSELDSIKEELDKIHKNGSGGSGDIIKLLNEQVNKEMQSSNLYMSMSSWCYTHSLDGAGLFLFDHAAEEYEHAKKLIIFLNENNVPVQLTSISAPEHKFEGLTQIFQKAYEHEQHISESINNIVDHAIKSKDHATFNFLQWYVAEQHEEEVLFKDILDKIELIGNENHGLYLADQYVKGIAKSRKSGS

SEQ ID NO: 180 - protein, 1720 aa, synthetic construct
NITQLCPFNEVFNITSFPSVYAWERMRITNCVADYSVLYNSSASFSTFQCYGVSPTKLNDLCFSSVYADYFVVKGDDVRQIAPAQTGVIADYNYKLPDDFTGCVIAWNTNSLDSSNEFFYRRFRHGKIKPYGRDLSNVLFNPSGGTCSAEGLNCYKPLASYGFWQSSGIGFQPYRVVVLSFELLNAPATVCGPGSGGSGNITNLCPFDEVFNATRFASVYAWNRKRISNCVADYSVLYNFAPFFAFKCYGVSPTKLNDLCFTNVYADSFVIRGNEVSQIAPGQTGNIADYNYKLPDDFTGCVIAWNSNKLDSKVGGNYNYRYRLFRKSNLKPFERDISTEIYQAGNKPCNGVAGVNCYFPLQSYGFRPTYGVGHQPYRVVVLSFELLHAPATVCGPGSGGSGSSQCVNLTTRTQLPPAYTNSFTRGVYYPDKVFRSSVLHSTQDLFLPFFSNVTWFHAIHVSGTNGTKRFDNPVLPFNDGVYFASTEKSNIIRGWIFGTTLDSKTQSLLIVNNATNVVIKVCEFQFCNDPFLGVYYHKNNKSWMESEFRVYSSANNCTFEYVSQPFLMDLEGKQGNFKNLREFVFKNIDGYFKIYSKHTPINLVRDLPQGFSALEPLVDLPIGINITRFQTLLALHRSYLTPGDSSSGWTAGAAAYYVGYLQPRTFLLKYNENGTITDAVDCALDPLSETKCTLKSFTVEKGIYQTSNFRVQPTESIVRFPNITNLCPFGEVFNATRFASVYAWNRKRISNCVADYSVLYNSASFSTFKCYGVSPTKLNDLCFTNVYADSFVIRGDEVRQIAPGQTGKIADYNYKLPDDFTGCVIAWNSNNLDSKVGGNYNYLYRLFRKSNLKPFERDISTEIYQAGSTPCNGVEGFNCYFPLQSYGFQPTNGVGYQPYRVVVLSFELLHAPATVCGPKKSTNLVKNKCVNFNFNGLTGTGVLTESNKKFLPFQQFGRDIADTTDAVRDPQTLEILDITPCSFGGVSVITPGTNTSNQVAVLYQDVNCTEVPVAIHADQLTPTWRVYSTGSNVFQTRAGCLIGAEHVNNSYECDIPIGAGICASYQTQTNSPGSASSVASQSIIAYTMSLGAENSVAYSNNSIAIPTNFTISVTTEILPVSMTKTSVDCTMYICGDSTECSNLLLQYGSFCTQLNRALTGIAVEQDKNTQEVFAQVKQIYKTPPIKDFGGFNFSQILPDPSKPSKRSFIEDLLFNKVTLADAGFIKQYGDCLGDIAARDLICAQKFNGLTVLPPLLTDEMIAQYTSALLAGTITSGWTFGAGAALQIPFAMQMAYRFNGIGVTQNVLYENQKLIANQFNSAIGKIQDSLSSTASALGKLQDVVNQNAQALNTLVKQLSSNFGAISSVLNDILSRLDPPEAEVQIDRLITGRLQSLQTYVTQQLIRAAEIRASANLAATKMSECVLGQSKRVDFCGKGYHLMSFPQSAPHGVVFLHVTYVPAQEKNFTTAPAICHDGKAHFPREGVFVSNGTHWFVTQRNFYEPQIITTDNTFVSGNCDVVIGIVNNTVYDPLQSELDSIKEELDKIHKNGSGGSGDIIKLLNEQVNKEMQSSNLYMSMSSWCYTHSLDGAGLFLFDHAAEEYEHAKKLIIFLNENNVPVQLTSISAPEHKFEGLTQIFQKAYEHEQHISESINNIVDHAIKSKDHATFNFLQWYVAEQHEEEVLFKDILDKIELIGNENHGLYLADQYVKGIAKSRKSGS

SEQ ID NO: 181 - protein, 1720 aa, synthetic construct
NITQLCPFNEVFNITSFPSVYAWERMRITNCVADYSVLYNSSASFSTFQCYGVSPTKLNDLCFSSVYADYFVVKGDDVRQIAPAQTGVIADYNYKLPDDFTGCVIAWNTNSLDSSNEFFYRRFRHGKIKPYGRDLSNVLFNPSGGTCSAEGLNCYKPLYSYGFWQSSGIGFQPYRVVVLSFELLNAPATVCGPGSGGSGNITNLCPFDEVFNATRFASVYAWNRKRISNCVADYSVLYNFAPFFAFKCYGVSPTKLNDLCFTNVYADSFVIRGNEVSQIAPGQTGNIADYNYKLPDDFTGCVIAWNSNKLDSKVGGNYNYRYRLFRKSNLKPFERDISTEIYQAGNKPCNGVAGVNCYFPLQSYGFRPTYGVGHQPYRVVVLSFELLHAPATVCGPGSGGSGSSQCVNLTTRTQLPPAYTNSFTRGVYYPDKVFRSSVLHSTQDLFLPFFSNVTWFHAIHVSGTNGTKRFDNPVLPFNDGVYFASTEKSNIIRGWIFGTTLDSKTQSLLIVNNATNVVIKVCEFQFCNDPFLGVYYHKNNKSWMESEFRVYSSANNCTFEYVSQPFLMDLEGKQGNFKNLREFVFKNIDGYFKIYSKHTPINLVRDLPQGFSALEPLVDLPIGINITRFQTLLALHRSYLTPGDSSSGWTAGAAAYYVGYLQPRTFLLKYNENGTITDAVDCALDPLSETKCTLKSFTVEKGIYQTSNFRVQPTESIVRFPNITNLCPFGEVFNATRFASVYAWNRKRISNCVADYSVLYNSASFSTFKCYGVSPTKLNDLCFTNVYADSFVIRGDEVRQIAPGQTGKIADYNYKLPDDFTGCVIAWNSNNLDSKVGGNYNYLYRLFRKSNLKPFERDISTEIYQAGSTPCNGVEGFNCYFPLQSYGFQPTNGVGYQPYRVVVLSFELLHAPATVCGPKKSTNLVKNKCVNFNFNGLTGTGVLTESNKKFLPFQQFGRDIADTTDAVRDPQTLEILDITPCSFGGVSVITPGTNTSNQVAVLYQDVNCTEVPVAIHADQLTPTWRVYSTGSNVFQTRAGCLIGAEHVNNSYECDIPIGAGICASYQTQTNSPGSASSVASQSIIAYTMSLGAENSVAYSNNSIAIPTNFTISVTTEILPVSMTKTSVDCTMYICGDSTECSNLLLQYGSFCTQLNRALTGIAVEQDKNTQEVFAQVKQIYKTPPIKDFGGFNFSQILPDPSKPSKRSFIEDLLFNKVTLADAGFIKQYGDCLGDIAARDLICAQKFNGLTVLPPLLTDEMIAQYTSALLAGTITSGWTFGAGAALQIPFAMQMAYRFNGIGVTQNVLYENQKLIANQFNSAIGKIQDSLSSTASALGKLQDVVNQNAQALNTLVKQLSSNFGAISSVLNDILSRLDPPEAEVQIDRLITGRLQSLQTYVTQQLIRAAEIRASANLAATKMSECVLGQSKRVDFCGKGYHLMSFPQSAPHGVVFLHVTYVPAQEKNFTTAPAICHDGKAHFPREGVFVSNGTHWFVTQRNFYEPQIITTDNTFVSGNCDVVIGIVNNTVYDPLQSELDSIKEELDKIHKNGSGGSGDIIKLLNEQVNKEMQSSNLYMSMSSWCYTHSLDGAGLFLFDHAAEEYEHAKKLIIFLNENNVPVQLTSISAPEHKFEGLTQIFQKAYEHEQHISESINNIVDHAIKSKDHATFNFLQWYVAEQHEEEVLFKDILDKIELIGNENHGLYLADQYVKGIAKSRKSGS

SEQ ID NO: 182 - protein, 1723 aa, synthetic construct
NITNLCPFGEVFNATTFPSVYAWERKRISNCVADYSVLYNSTSFSTFKCYGVSATKLNDLCFSNVYADSFVVKGDDVRQIAPGQTGVIADYNYKLPDDFLGCVLAWNTNSKDSSTSGNYNYLYRWVRRSKLNPYERDLSNDIYSPGGQSCSAVGPNCYNPLRPYGFFTTAGVGHQPYRVVVLSFELLNAPATVCGPGSGGSGNITNLCPFDEVFNATRFASVYAWNRKRISNCVADYSVLYNFAPFFAFKCYGVSPTKLNDLCFTNVYADSFVIRGNEVSQIAPGQTGNIADYNYKLPDDFTGCVIAWNSNKLDSKVGGNYNYRYRLFRKSNLKPFERDISTEIYQAGNKPCNGVAGVNCYFPLQSYGFRPTYGVGHQPYRVVVLSFELLHAPATVCGPGSGGSGSSQCVNLTTRTQLPPAYTNSFTRGVYYPDKVFRSSVLHSTQDLFLPFFSNVTWFHAIHVSGTNGTKRFDNPVLPFNDGVYFASTEKSNIIRGWIFGTTLDSKTQSLLIVNNATNVVIKVCEFQFCNDPFLGVYYHKNNKSWMESEFRVYSSANNCTFEYVSQPFLMDLEGKQGNFKNLREFVFKNIDGYFKIYSKHTPINLVRDLPQGFSALEPLVDLPIGINITRFQTLLALHRSYLTPGDSSSGWTAGAAAYYVGYLQPRTFLLKYNENGTITDAVDCALDPLSETKCTLKSFTVEKGIYQTSNFRVQPTESIVRFPNITNLCPFGEVFNATRFASVYAWNRKRISNCVADYSVLYNSASFSTFKCYGVSPTKLNDLCFTNVYADSFVIRGDEVRQIAPGQTGKIADYNYKLPDDFTGCVIAWNSNNLDSKVGGNYNYLYRLFRKSNLKPFERDISTEIYQAGSTPCNGVEGFNCYFPLQSYGFQPTNGVGYQPYRVVVLSFELLHAPATVCGPKKSTNLVKNKCVNFNFNGLTGTGVLTESNKKFLPFQQFGRDIADTTDAVRDPQTLEILDITPCSFGGVSVITPGTNTSNQVAVLYQDVNCTEVPVAIHADQLTPTWRVYSTGSNVFQTRAGCLIGAEHVNNSYECDIPIGAGICASYQTQTNSPGSASSVASQSIIAYTMSLGAENSVAYSNNSIAIPTNFTISVTTEILPVSMTKTSVDCTMYICGDSTECSNLLLQYGSFCTQLNRALTGIAVEQDKNTQEVFAQVKQIYKTPPIKDFGGFNFSQILPDPSKPSKRSFIEDLLFNKVTLADAGFIKQYGDCLGDIAARDLICAQKFNGLTVLPPLLTDEMIAQYTSALLAGTITSGWTFGAGAALQIPFAMQMAYRFNGIGVTQNVLYENQKLIANQFNSAIGKIQDSLSSTASALGKLQDVVNQNAQALNTLVKQLSSNFGAISSVLNDILSRLDPPEAEVQIDRLITGRLQSLQTYVTQQLIRAAEIRASANLAATKMSECVLGQSKRVDFCGKGYHLMSFPQSAPHGVVFLHVTYVPAQEKNFTTAPAICHDGKAHFPREGVFVSNGTHWFVTQRNFYEPQIITTDNTFVSGNCDVVIGIVNNTVYDPLQSELDSIKEELDKIHKNGSGGSGDIIKLLNEQVNKEMQSSNLYMSMSSWCYTHSLDGAGLFLFDHAAEEYEHAKKLIIFLNENNVPVQLTSISAPEHKFEGLTQIFQKAYEHEQHISESINNIVDHAIKSKDHATFNFLQWYVAEQHEEEVLFKDILDKIELIGNENHGLYLADQYVKGIAKSRKSGS

SEQ ID NO: 183 - protein, 1723 aa, synthetic construct
NITNLCPFGEVFNATTFPSVYAWERKRISNCVADYSVLYNSTSFSTFKCYGVSATKLNDLCFSNVYADSFVVKGDDVRQIAPGQTGVIADYNYKLPDDFTGCVLAWNTRNIDATQTGNYNYKYRSLRHGKLRPFERDISNVPFSPDGKPCTPPAFNCYWPLNDYGFYITNGIGYQPYRVVVLSFELLNAPATVCGPGSGGSGNITNLCPFDEVFNATRFASVYAWNRKRISNCVADYSVLYNFAPFFAFKCYGVSPTKLNDLCFTNVYADSFVIRGNEVSQIAPGQTGNIADYNYKLPDDFTGCVIAWNSNKLDSKVGGNYNYRYRLFRKSNLKPFERDISTEIYQAGNKPCNGVAGVNCYFPLQSYGFRPTYGVGHQPYRVVVLSFELLHAPATVCGPGSGGSGSSQCVNLTTRTQLPPAYTNSFTRGVYYPDKVFRSSVLHSTQDLFLPFFSNVTWFHAIHVSGTNGTKRFDNPVLPFNDGVYFASTEKSNIIRGWIFGTTLDSKTQSLLIVNNATNVVIKVCEFQFCNDPFLGVYYHKNNKSWMESEFRVYSSANNCTFEYVSQPFLMDLEGKQGNFKNLREFVFKNIDGYFKIYSKHTPINLVRDLPQGFSALEPLVDLPIGINITRFQTLLALHRSYLTPGDSSSGWTAGAAAYYVGYLQPRTFLLKYNENGTITDAVDCALDPLSETKCTLKSFTVEKGIYQTSNFRVQPTESIVRFPNITNLCPFGEVFNATRFASVYAWNRKRISNCVADYSVLYNSASFSTFKCYGVSPTKLNDLCFTNVYADSFVIRGDEVRQIAPGQTGKIADYNYKLPDDFTGCVIAWNSNNLDSKVGGNYNYLYRLFRKSNLKPFERDISTEIYQAGSTPCNGVEGFNCYFPLQSYGFQPTNGVGYQPYRVVVLSFELLHAPATVCGPKKSTNLVKNKCVNFNFNGLTGTGVLTESNKKFLPFQQFGRDIADTTDAVRDPQTLEILDITPCSFGGVSVITPGTNTSNQVAVLYQDVNCTEVPVAIHADQLTPTWRVYSTGSNVFQTRAGCLIGAEHVNNSYECDIPIGAGICASYQTQTNSPGSASSVASQSIIAYTMSLGAENSVAYSNNSIAIPTNFTISVTTEILPVSMTKTSVDCTMYICGDSTECSNLLLQYGSFCTQLNRALTGIAVEQDKNTQEVFAQVKQIYKTPPIKDFGGFNFSQILPDPSKPSKRSFIEDLLFNKVTLADAGFIKQYGDCLGDIAARDLICAQKFNGLTVLPPLLTDEMIAQYTSALLAGTITSGWTFGAGAALQIPFAMQMAYRFNGIGVTQNVLYENQKLIANQFNSAIGKIQDSLSSTASALGKLQDVVNQNAQALNTLVKQLSSNFGAISSVLNDILSRLDPPEAEVQIDRLITGRLQSLQTYVTQQLIRAAEIRASANLAATKMSECVLGQSKRVDFCGKGYHLMSFPQSAPHGVVFLHVTYVPAQEKNFTTAPAICHDGKAHFPREGVFVSNGTHWFVTQRNFYEPQIITTDNTFVSGNCDVVIGIVNNTVYDPLQSELDSIKEELDKIHKNGSGGSGDIIKLLNEQVNKEMQSSNLYMSMSSWCYTHSLDGAGLFLFDHAAEEYEHAKKLIIFLNENNVPVQLTSISAPEHKFEGLTQIFQKAYEHEQHISESINNIVDHAIKSKDHATFNFLQWYVAEQHEEEVLFKDILDKIELIGNENHGLYLADQYVKGIAKSRKSGS

SEQ ID NO: 184 - protein, 1705 aa, synthetic construct
NITNVCPFHKVFNATRFPSVYAWERTKISDCIADYTVFYNSTSFSTFKCYGVSPSKLIDLCFTSVYADTFLIRFSEVRQVAPGQTGVIADYNYKLPDDFTGCVIAWNTAKQDTGHYFYRSHRSTKLKPFERDLSSDENGVRTLSTYDFNPNVPLEYQATRVVVLSFELLNAPATVCGPGSGGSGNITNLCPFDEVFNATRFASVYAWNRKRISNCVADYSVLYNFAPFFAFKCYGVSPTKLNDLCFTNVYADSFVIRGNEVSQIAPGQTGNIADYNYKLPDDFTGCVIAWNSNKLDSKVGGNYNYRYRLFRKSNLKPFERDISTEIYQAGNKPCNGVAGVNCYFPLQSYGFRPTYGVGHQPYRVVVLSFELLHAPATVCGPGSGGSGSSQCVNLTTRTQLPPAYTNSFTRGVYYPDKVFRSSVLHSTQDLFLPFFSNVTWFHAIHVSGTNGTKRFDNPVLPFNDGVYFASTEKSNIIRGWIFGTTLDSKTQSLLIVNNATNVVIKVCEFQFCNDPFLGVYYHKNNKSWMESEFRVYSSANNCTFEYVSQPFLMDLEGKQGNFKNLREFVFKNIDGYFKIYSKHTPINLVRDLPQGFSALEPLVDLPIGINITRFQTLLALHRSYLTPGDSSSGWTAGAAAYYVGYLQPRTFLLKYNENGTITDAVDCALDPLSETKCTLKSFTVEKGIYQTSNFRVQPTESIVRFPNITNLCPFGEVFNATRFASVYAWNRKRISNCVADYSVLYNSASFSTFKCYGVSPTKLNDLCFTNVYADSFVIRGDEVRQIAPGQTGKIADYNYKLPDDFTGCVIAWNSNNLDSKVGGNYNYLYRLFRKSNLKPFERDISTEIYQAGSTPCNGVEGFNCYFPLQSYGFQPTNGVGYQPYRVVVLSFELLHAPATVCGPKKSTNLVKNKCVNFNFNGLTGTGVLTESNKKFLPFQQFGRDIADTTDAVRDPQTLEILDITPCSFGGVSVITPGTNTSNQVAVLYQDVNCTEVPVAIHADQLTPTWRVYSTGSNVFQTRAGCLIGAEHVNNSYECDIPIGAGICASYQTQTNSPGSASSVASQSIIAYTMSLGAENSVAYSNNSIAIPTNFTISVTTEILPVSMTKTSVDCTMYICGDSTECSNLLLQYGSFCTQLNRALTGIAVEQDKNTQEVFAQVKQIYKTPPIKDFGGFNFSQILPDPSKPSKRSFIEDLLFNKVTLADAGFIKQYGDCLGDIAARDLICAQKFNGLTVLPPLLTDEMIAQYTSALLAGTITSGWTFGAGAALQIPFAMQMAYRFNGIGVTQNVLYENQKLIANQFNSAIGKIQDSLSSTASALGKLQDVVNQNAQALNTLVKQLSSNFGAISSVLNDILSRLDPPEAEVQIDRLITGRLQSLQTYVTQQLIRAAEIRASANLAATKMSECVLGQSKRVDFCGKGYHLMSFPQSAPHGVVFLHVTYVPAQEKNFTTAPAICHDGKAHFPREGVFVSNGTHWFVTQRNFYEPQIITTDNTFVSGNCDVVIGIVNNTVYDPLQSELDSIKEELDKIHKNGSGGSGDIIKLLNEQVNKEMQSSNLYMSMSSWCYTHSLDGAGLFLFDHAAEEYEHAKKLIIFLNENNVPVQLTSISAPEHKFEGLTQIFQKAYEHEQHISESINNIVDHAIKSKDHATFNFLQWYVAEQHEEEVLFKDILDKIELIGNENHGLYLADQYVKGIAKSRKSGS

SEQ ID NO: 185 - protein, 1724 aa, synthetic construct
NITNLCPFGEVFNATTFASVYAWNRKRISNCVADYSVLYNSTSFSTFKCYGVSPTKLNDLCFTNVYADSFVVRGDEVRQIAPGQTGKIADYNYKLPDDFTGCVIAWNSNNLDSKVGGNYNYLYRLFRKSNLKPFERDISTEIYQAGSTPCNGVEGFNCYFPLQSYGFHPTNGVGYQPYRVVVLSFELLNAPATVCGPGSGGSGNITNLCPFDEVFNATRFASVYAWNRKRISNCVADYSVLYNFAPFFAFKCYGVSPTKLNDLCFTNVYADSFVIRGNEVSQIAPGQTGNIADYNYKLPDDFTGCVIAWNSNKLDSKVGGNYNYRYRLFRKSNLKPFERDISTEIYQAGNKPCNGVAGVNCYFPLQSYGFRPTYGVGHQPYRVVVLSFELLHAPATVCGPGSGGSGSSQCVNLTTRTQLPPAYTNSFTRGVYYPDKVFRSSVLHSTQDLFLPFFSNVTWFHAIHVSGTNGTKRFDNPVLPFNDGVYFASTEKSNIIRGWIFGTTLDSKTQSLLIVNNATNVVIKVCEFQFCNDPFLGVYYHKNNKSWMESEFRVYSSANNCTFEYVSQPFLMDLEGKQGNFKNLREFVFKNIDGYFKIYSKHTPINLVRDLPQGFSALEPLVDLPIGINITRFQTLLALHRSYLTPGDSSSGWTAGAAAYYVGYLQPRTFLLKYNENGTITDAVDCALDPLSETKCTLKSFTVEKGIYQTSNFRVQPTESIVRFPNITNLCPFGEVFNATRFASVYAWNRKRISNCVADYSVLYNSASFSTFKCYGVSPTKLNDLCFTNVYADSFVIRGDEVRQIAPGQTGKIADYNYKLPDDFTGCVIAWNSNNLDSKVGGNYNYLYRLFRKSNLKPFERDISTEIYQAGSTPCNGVEGFNCYFPLQSYGFQPTNGVGYQPYRVVVLSFELLHAPATVCGPKKSTNLVKNKCVNFNFNGLTGTGVLTESNKKFLPFQQFGRDIADTTDAVRDPQTLEILDITPCSFGGVSVITPGTNTSNQVAVLYQDVNCTEVPVAIHADQLTPTWRVYSTGSNVFQTRAGCLIGAEHVNNSYECDIPIGAGICASYQTQTNSPGSASSVASQSIIAYTMSLGAENSVAYSNNSIAIPTNFTISVTTEILPVSMTKTSVDCTMYICGDSTECSNLLLQYGSFCTQLNRALTGIAVEQDKNTQEVFAQVKQIYKTPPIKDFGGFNFSQILPDPSKPSKRSFIEDLLFNKVTLADAGFIKQYGDCLGDIAARDLICAQKFNGLTVLPPLLTDEMIAQYTSALLAGTITSGWTFGAGAALQIPFAMQMAYRFNGIGVTQNVLYENQKLIANQFNSAIGKIQDSLSSTASALGKLQDVVNQNAQALNTLVKQLSSNFGAISSVLNDILSRLDPPEAEVQIDRLITGRLQSLQTYVTQQLIRAAEIRASANLAATKMSECVLGQSKRVDFCGKGYHLMSFPQSAPHGVVFLHVTYVPAQEKNFTTAPAICHDGKAHFPREGVFVSNGTHWFVTQRNFYEPQIITTDNTFVSGNCDVVIGIVNNTVYDPLQSELDSIKEELDKIHKNGSGGSGDIIKLLNEQVNKEMQSSNLYMSMSSWCYTHSLDGAGLFLFDHAAEEYEHAKKLIIFLNENNVPVQLTSISAPEHKFEGLTQIFQKAYEHEQHISESINNIVDHAIKSKDHATFNFLQWYVAEQHEEEVLFKDILDKIELIGNENHGLYLADQYVKGIAKSRKSGS

SEQ ID NO: 186 - protein, 1724 aa, synthetic construct
NITNLCPFGEVFNATTFASVYAWNRKRISNCVADYSVLYNSTSFSTFKCYGVSPTKLNDLCFTNVYADSFVITGDEVRQIAPGQTGKIADYNYKLPDDFTGCVIAWNSKHIDAKEGGNFNYLYRLFRKANLKPFERDISTEIYQAGSKPCNGQTGLNCYYPLYRYGFYPTDGVGHQPYRVVVLSFELLNAPATVCGPGSGGSGNITNLCPFDEVFNATRFASVYAWNRKRISNCVADYSVLYNFAPFFAFKCYGVSPTKLNDLCFTNVYADSFVIRGNEVSQIAPGQTGNIADYNYKLPDDFTGCVIAWNSNKLDSKVGGNYNYRYRLFRKSNLKPFERDISTEIYQAGNKPCNGVAGVNCYFPLQSYGFRPTYGVGHQPYRVVVLSFELLHAPATVCGPGSGGSGSSQCVNLTTRTQLPPAYTNSFTRGVYYPDKVFRSSVLHSTQDLFLPFFSNVTWFHAIHVSGTNGTKRFDNPVLPFNDGVYFASTEKSNIIRGWIFGTTLDSKTQSLLIVNNATNVVIKVCEFQFCNDPFLGVYYHKNNKSWMESEFRVYSSANNCTFEYVSQPFLMDLEGKQGNFKNLREFVFKNIDGYFKIYSKHTPINLVRDLPQGFSALEPLVDLPIGINITRFQTLLALHRSYLTPGDSSSGWTAGAAAYYVGYLQPRTFLLKYNENGTITDAVDCALDPLSETKCTLKSFTVEKGIYQTSNFRVQPTESIVRFPNITNLCPFGEVFNATRFASVYAWNRKRISNCVADYSVLYNSASFSTFKCYGVSPTKLNDLCFTNVYADSFVIRGDEVRQIAPGQTGKIADYNYKLPDDFTGCVIAWNSNNLDSKVGGNYNYLYRLFRKSNLKPFERDISTEIYQAGSTPCNGVEGFNCYFPLQSYGFQPTNGVGYQPYRVVVLSFELLHAPATVCGPKKSTNLVKNKCVNFNFNGLTGTGVLTESNKKFLPFQQFGRDIADTTDAVRDPQTLEILDITPCSFGGVSVITPGTNTSNQVAVLYQDVNCTEVPVAIHADQLTPTWRVYSTGSNVFQTRAGCLIGAEHVNNSYECDIPIGAGICASYQTQTNSPGSASSVASQSIIAYTMSLGAENSVAYSNNSIAIPTNFTISVTTEILPVSMTKTSVDCTMYICGDSTECSNLLLQYGSFCTQLNRALTGIAVEQDKNTQEVFAQVKQIYKTPPIKDFGGFNFSQILPDPSKPSKRSFIEDLLFNKVTLADAGFIKQYGDCLGDIAARDLICAQKFNGLTVLPPLLTDEMIAQYTSALLAGTITSGWTFGAGAALQIPFAMQMAYRFNGIGVTQNVLYENQKLIANQFNSAIGKIQDSLSSTASALGKLQDVVNQNAQALNTLVKQLSSNFGAISSVLNDILSRLDPPEAEVQIDRLITGRLQSLQTYVTQQLIRAAEIRASANLAATKMSECVLGQSKRVDFCGKGYHLMSFPQSAPHGVVFLHVTYVPAQEKNFTTAPAICHDGKAHFPREGVFVSNGTHWFVTQRNFYEPQIITTDNTFVSGNCDVVIGIVNNTVYDPLQSELDSIKEELDKIHKNGSGGSGDIIKLLNEQVNKEMQSSNLYMSMSSWCYTHSLDGAGLFLFDHAAEEYEHAKKLIIFLNENNVPVQLTSISAPEHKFEGLTQIFQKAYEHEQHISESINNIVDHAIKSKDHATFNFLQWYVAEQHEEEVLFKDILDKIELIGNENHGLYLADQYVKGIAKSRKSGS

SEQ ID NO: 187 - protein, 1705 aa, synthetic construct
NITNFCPFDKVFNATRFPNVYAWQRTKISDCIADYTVLYNSTSFSTFKCYGVSPSKLIDLCFTSVYADTFLIRFSEVRQIAPGETGVIADYNYKLPDDFTGCVLAWNTAQQDIGSYFYRSHRAVKLKPFERDLSSDENGVRTLSTYDFNPNVPLDYQATRVVVLSFELLNAPATVCGPGSGGSGNITNLCPFDEVFNATRFASVYAWNRKRISNCVADYSVLYNFAPFFAFKCYGVSPTKLNDLCFTNVYADSFVIRGNEVSQIAPGQTGNIADYNYKLPDDFTGCVIAWNSNKLDSKVGGNYNYRYRLFRKSNLKPFERDISTEIYQAGNKPCNGVAGVNCYFPLQSYGFRPTYGVGHQPYRVVVLSFELLHAPATVCGPGSGGSGSSQCVNLTTRTQLPPAYTNSFTRGVYYPDKVFRSSVLHSTQDLFLPFFSNVTWFHAIHVSGTNGTKRFDNPVLPFNDGVYFASTEKSNIIRGWIFGTTLDSKTQSLLIVNNATNVVIKVCEFQFCNDPFLGVYYHKNNKSWMESEFRVYSSANNCTFEYVSQPFLMDLEGKQGNFKNLREFVFKNIDGYFKIYSKHTPINLVRDLPQGFSALEPLVDLPIGINITRFQTLLALHRSYLTPGDSSSGWTAGAAAYYVGYLQPRTFLLKYNENGTITDAVDCALDPLSETKCTLKSFTVEKGIYQTSNFRVQPTESIVRFPNITNLCPFGEVFNATRFASVYAWNRKRISNCVADYSVLYNSASFSTFKCYGVSPTKLNDLCFTNVYADSFVIRGDEVRQIAPGQTGKIADYNYKLPDDFTGCVIAWNSNNLDSKVGGNYNYLYRLFRKSNLKPFERDISTEIYQAGSTPCNGVEGFNCYFPLQSYGFQPTNGVGYQPYRVVVLSFELLHAPATVCGPKKSTNLVKNKCVNFNFNGLTGTGVLTESNKKFLPFQQFGRDIADTTDAVRDPQTLEILDITPCSFGGVSVITPGTNTSNQVAVLYQDVNCTEVPVAIHADQLTPTWRVYSTGSNVFQTRAGCLIGAEHVNNSYECDIPIGAGICASYQTQTNSPGSASSVASQSIIAYTMSLGAENSVAYSNNSIAIPTNFTISVTTEILPVSMTKTSVDCTMYICGDSTECSNLLLQYGSFCTQLNRALTGIAVEQDKNTQEVFAQVKQIYKTPPIKDFGGFNFSQILPDPSKPSKRSFIEDLLFNKVTLADAGFIKQYGDCLGDIAARDLICAQKFNGLTVLPPLLTDEMIAQYTSALLAGTITSGWTFGAGAALQIPFAMQMAYRFNGIGVTQNVLYENQKLIANQFNSAIGKIQDSLSSTASALGKLQDVVNQNAQALNTLVKQLSSNFGAISSVLNDILSRLDPPEAEVQIDRLITGRLQSLQTYVTQQLIRAAEIRASANLAATKMSECVLGQSKRVDFCGKGYHLMSFPQSAPHGVVFLHVTYVPAQEKNFTTAPAICHDGKAHFPREGVFVSNGTHWFVTQRNFYEPQIITTDNTFVSGNCDVVIGIVNNTVYDPLQSELDSIKEELDKIHKNGSGGSGDIIKLLNEQVNKEMQSSNLYMSMSSWCYTHSLDGAGLFLFDHAAEEYEHAKKLIIFLNENNVPVQLTSISAPEHKFEGLTQIFQKAYEHEQHISESINNIVDHAIKSKDHATFNFLQWYVAEQHEEEVLFKDILDKIELIGNENHGLYLADQYVKGIAKSRKSGS

SEQ ID NO: 188 - protein, 1705 aa, synthetic construct
NITNFCPFDKVFNATRFPNVYAWQRTKISDCIADYTVLYNSTSFSTFKCYGVSPSKLIDLCFTSVYADTFLIRFSEVRQIAPGETGVIADYNYKLPDDFTGCVLAWNTAQQDIGSYFYRSHRAVKLKPFERDLSSDENGVRTLSTYDFWPNVPLDYQATRVVVLSFELLNAPATVCGPGSGGSGNITNLCPFDEVFNATRFASVYAWNRKRISNCVADYSVLYNFAPFFAFKCYGVSPTKLNDLCFTNVYADSFVIRGNEVSQIAPGQTGNIADYNYKLPDDFTGCVIAWNSNKLDSKVGGNYNYRYRLFRKSNLKPFERDISTEIYQAGNKPCNGVAGVNCYFPLQSYGFRPTYGVGHQPYRVVVLSFELLHAPATVCGPGSGGSGSSQCVNLTTRTQLPPAYTNSFTRGVYYPDKVFRSSVLHSTQDLFLPFFSNVTWFHAIHVSGTNGTKRFDNPVLPFNDGVYFASTEKSNIIRGWIFGTTLDSKTQSLLIVNNATNVVIKVCEFQFCNDPFLGVYYHKNNKSWMESEFRVYSSANNCTFEYVSQPFLMDLEGKQGNFKNLREFVFKNIDGYFKIYSKHTPINLVRDLPQGFSALEPLVDLPIGINITRFQTLLALHRSYLTPGDSSSGWTAGAAAYYVGYLQPRTFLLKYNENGTITDAVDCALDPLSETKCTLKSFTVEKGIYQTSNFRVQPTESIVRFPNITNLCPFGEVFNATRFASVYAWNRKRISNCVADYSVLYNSASFSTFKCYGVSPTKLNDLCFTNVYADSFVIRGDEVRQIAPGQTGKIADYNYKLPDDFTGCVIAWNSNNLDSKVGGNYNYLYRLFRKSNLKPFERDISTEIYQAGSTPCNGVEGFNCYFPLQSYGFQPTNGVGYQPYRVVVLSFELLHAPATVCGPKKSTNLVKNKCVNFNFNGLTGTGVLTESNKKFLPFQQFGRDIADTTDAVRDPQTLEILDITPCSFGGVSVITPGTNTSNQVAVLYQDVNCTEVPVAIHADQLTPTWRVYSTGSNVFQTRAGCLIGAEHVNNSYECDIPIGAGICASYQTQTNSPGSASSVASQSIIAYTMSLGAENSVAYSNNSIAIPTNFTISVTTEILPVSMTKTSVDCTMYICGDSTECSNLLLQYGSFCTQLNRALTGIAVEQDKNTQEVFAQVKQIYKTPPIKDFGGFNFSQILPDPSKPSKRSFIEDLLFNKVTLADAGFIKQYGDCLGDIAARDLICAQKFNGLTVLPPLLTDEMIAQYTSALLAGTITSGWTFGAGAALQIPFAMQMAYRFNGIGVTQNVLYENQKLIANQFNSAIGKIQDSLSSTASALGKLQDVVNQNAQALNTLVKQLSSNFGAISSVLNDILSRLDPPEAEVQIDRLITGRLQSLQTYVTQQLIRAAEIRASANLAATKMSECVLGQSKRVDFCGKGYHLMSFPQSAPHGVVFLHVTYVPAQEKNFTTAPAICHDGKAHFPREGVFVSNGTHWFVTQRNFYEPQIITTDNTFVSGNCDVVIGIVNNTVYDPLQSELDSIKEELDKIHKNGSGGSGDIIKLLNEQVNKEMQSSNLYMSMSSWCYTHSLDGAGLFLFDHAAEEYEHAKKLIIFLNENNVPVQLTSISAPEHKFEGLTQIFQKAYEHEQHISESINNIVDHAIKSKDHATFNFLQWYVAEQHEEEVLFKDILDKIELIGNENHGLYLADQYVKGIAKSRKSGS

SEQ ID NO: 189 - protein, 1705 aa, synthetic construct
NITNFCPFDKVFNATRFPNVYAWQRTKISDCIADYTVLYNSTSFSTFKCYGVSPSKLIDLCFTSVYADTFLIRFSEVRQIAPGETGVIADYNYKLPDDFTGCVLAWNTAQQDIGSYFYRSHRAVKLKPFERDLSSDENGVRTLYTYDFWPNVPLDYQATRVVVLSFELLNAPATVCGPGSGGSGNITNLCPFDEVFNATRFASVYAWNRKRISNCVADYSVLYNFAPFFAFKCYGVSPTKLNDLCFTNVYADSFVIRGNEVSQIAPGQTGNIADYNYKLPDDFTGCVIAWNSNKLDSKVGGNYNYRYRLFRKSNLKPFERDISTEIYQAGNKPCNGVAGVNCYFPLQSYGFRPTYGVGHQPYRVVVLSFELLHAPATVCGPGSGGSGSSQCVNLTTRTQLPPAYTNSFTRGVYYPDKVFRSSVLHSTQDLFLPFFSNVTWFHAIHVSGTNGTKRFDNPVLPFNDGVYFASTEKSNIIRGWIFGTTLDSKTQSLLIVNNATNVVIKVCEFQFCNDPFLGVYYHKNNKSWMESEFRVYSSANNCTFEYVSQPFLMDLEGKQGNFKNLREFVFKNIDGYFKIYSKHTPINLVRDLPQGFSALEPLVDLPIGINITRFQTLLALHRSYLTPGDSSSGWTAGAAAYYVGYLQPRTFLLKYNENGTITDAVDCALDPLSETKCTLKSFTVEKGIYQTSNFRVQPTESIVRFPNITNLCPFGEVFNATRFASVYAWNRKRISNCVADYSVLYNSASFSTFKCYGVSPTKLNDLCFTNVYADSFVIRGDEVRQIAPGQTGKIADYNYKLPDDFTGCVIAWNSNNLDSKVGGNYNYLYRLFRKSNLKPFERDISTEIYQAGSTPCNGVEGFNCYFPLQSYGFQPTNGVGYQPYRVVVLSFELLHAPATVCGPKKSTNLVKNKCVNFNFNGLTGTGVLTESNKKFLPFQQFGRDIADTTDAVRDPQTLEILDITPCSFGGVSVITPGTNTSNQVAVLYQDVNCTEVPVAIHADQLTPTWRVYSTGSNVFQTRAGCLIGAEHVNNSYECDIPIGAGICASYQTQTNSPGSASSVASQSIIAYTMSLGAENSVAYSNNSIAIPTNFTISVTTEILPVSMTKTSVDCTMYICGDSTECSNLLLQYGSFCTQLNRALTGIAVEQDKNTQEVFAQVKQIYKTPPIKDFGGFNFSQILPDPSKPSKRSFIEDLLFNKVTLADAGFIKQYGDCLGDIAARDLICAQKFNGLTVLPPLLTDEMIAQYTSALLAGTITSGWTFGAGAALQIPFAMQMAYRFNGIGVTQNVLYENQKLIANQFNSAIGKIQDSLSSTASALGKLQDVVNQNAQALNTLVKQLSSNFGAISSVLNDILSRLDPPEAEVQIDRLITGRLQSLQTYVTQQLIRAAEIRASANLAATKMSECVLGQSKRVDFCGKGYHLMSFPQSAPHGVVFLHVTYVPAQEKNFTTAPAICHDGKAHFPREGVFVSNGTHWFVTQRNFYEPQIITTDNTFVSGNCDVVIGIVNNTVYDPLQSELDSIKEELDKIHKNGSGGSGDIIKLLNEQVNKEMQSSNLYMSMSSWCYTHSLDGAGLFLFDHAAEEYEHAKKLIIFLNENNVPVQLTSISAPEHKFEGLTQIFQKAYEHEQHISESINNIVDHAIKSKDHATFNFLQWYVAEQHEEEVLFKDILDKIELIGNENHGLYLADQYVKGIAKSRKSGS

SEQ ID NO: 190 - protein, 1705 aa, synthetic construct
NITNLCPFDAVFNATRFPSVYAWERVKISNCVADYTAFYNSTSFSTFKCYGVSPSKLIDLCFTSVYADTFLIRFSEVRQVAPGETGVIADYNYKLPDDFTGCVIAWNTAKQDVGSYFYRSHRSSKLKPFERDLSSDENGVRTLSTYDFNPNVPLDYQATRVVVLSFELLNAPATVCGPGSGGSGNITNLCPFDEVFNATRFASVYAWNRKRISNCVADYSVLYNFAPFFAFKCYGVSPTKLNDLCFTNVYADSFVIRGNEVSQIAPGQTGNIADYNYKLPDDFTGCVIAWNSNKLDSKVGGNYNYRYRLFRKSNLKPFERDISTEIYQAGNKPCNGVAGVNCYFPLQSYGFRPTYGVGHQPYRVVVLSFELLHAPATVCGPGSGGSGSSQCVNLTTRTQLPPAYTNSFTRGVYYPDKVFRSSVLHSTQDLFLPFFSNVTWFHAIHVSGTNGTKRFDNPVLPFNDGVYFASTEKSNIIRGWIFGTTLDSKTQSLLIVNNATNVVIKVCEFQFCNDPFLGVYYHKNNKSWMESEFRVYSSANNCTFEYVSQPFLMDLEGKQGNFKNLREFVFKNIDGYFKIYSKHTPINLVRDLPQGFSALEPLVDLPIGINITRFQTLLALHRSYLTPGDSSSGWTAGAAAYYVGYLQPRTFLLKYNENGTITDAVDCALDPLSETKCTLKSFTVEKGIYQTSNFRVQPTESIVRFPNITNLCPFGEVFNATRFASVYAWNRKRISNCVADYSVLYNSASFSTFKCYGVSPTKLNDLCFTNVYADSFVIRGDEVRQIAPGQTGKIADYNYKLPDDFTGCVIAWNSNNLDSKVGGNYNYLYRLFRKSNLKPFERDISTEIYQAGSTPCNGVEGFNCYFPLQSYGFQPTNGVGYQPYRVVVLSFELLHAPATVCGPKKSTNLVKNKCVNFNFNGLTGTGVLTESNKKFLPFQQFGRDIADTTDAVRDPQTLEILDITPCSFGGVSVITPGTNTSNQVAVLYQDVNCTEVPVAIHADQLTPTWRVYSTGSNVFQTRAGCLIGAEHVNNSYECDIPIGAGICASYQTQTNSPGSASSVASQSIIAYTMSLGAENSVAYSNNSIAIPTNFTISVTTEILPVSMTKTSVDCTMYICGDSTECSNLLLQYGSFCTQLNRALTGIAVEQDKNTQEVFAQVKQIYKTPPIKDFGGFNFSQILPDPSKPSKRSFIEDLLFNKVTLADAGFIKQYGDCLGDIAARDLICAQKFNGLTVLPPLLTDEMIAQYTSALLAGTITSGWTFGAGAALQIPFAMQMAYRFNGIGVTQNVLYENQKLIANQFNSAIGKIQDSLSSTASALGKLQDVVNQNAQALNTLVKQLSSNFGAISSVLNDILSRLDPPEAEVQIDRLITGRLQSLQTYVTQQLIRAAEIRASANLAATKMSECVLGQSKRVDFCGKGYHLMSFPQSAPHGVVFLHVTYVPAQEKNFTTAPAICHDGKAHFPREGVFVSNGTHWFVTQRNFYEPQIITTDNTFVSGNCDVVIGIVNNTVYDPLQSELDSIKEELDKIHKNGSGGSGDIIKLLNEQVNKEMQSSNLYMSMSSWCYTHSLDGAGLFLFDHAAEEYEHAKKLIIFLNENNVPVQLTSISAPEHKFEGLTQIFQKAYEHEQHISESINNIVDHAIKSKDHATFNFLQWYVAEQHEEEVLFKDILDKIELIGNENHGLYLADQYVKGIAKSRKSGS

SEQ ID NO: 191 - protein, 1705 aa, synthetic construct
NITNRCPFDKVFNATRFPSVYAWERTKISDCVADYTVLYNSTSFSTFKCYGVSPSKLIDLCFTSVYADTFLIRSSEVRQVAPGETGVIADYNYKLPDDFTGCVIAWNTANQDQGQYYYRSSRKEKLKPFERDLSSDENGVYTLSTYDFYPSVPLDYQATRVVVLSFELLNAPATVCGPGSGGSGNITNLCPFDEVFNATRFASVYAWNRKRISNCVADYSVLYNFAPFFAFKCYGVSPTKLNDLCFTNVYADSFVIRGNEVSQIAPGQTGNIADYNYKLPDDFTGCVIAWNSNKLDSKVGGNYNYRYRLFRKSNLKPFERDISTEIYQAGNKPCNGVAGVNCYFPLQSYGFRPTYGVGHQPYRVVVLSFELLHAPATVCGPGSGGSGSSQCVNLTTRTQLPPAYTNSFTRGVYYPDKVFRSSVLHSTQDLFLPFFSNVTWFHAIHVSGTNGTKRFDNPVLPFNDGVYFASTEKSNIIRGWIFGTTLDSKTQSLLIVNNATNVVIKVCEFQFCNDPFLGVYYHKNNKSWMESEFRVYSSANNCTFEYVSQPFLMDLEGKQGNFKNLREFVFKNIDGYFKIYSKHTPINLVRDLPQGFSALEPLVDLPIGINITRFQTLLALHRSYLTPGDSSSGWTAGAAAYYVGYLQPRTFLLKYNENGTITDAVDCALDPLSETKCTLKSFTVEKGIYQTSNFRVQPTESIVRFPNITNLCPFGEVFNATRFASVYAWNRKRISNCVADYSVLYNSASFSTFKCYGVSPTKLNDLCFTNVYADSFVIRGDEVRQIAPGQTGKIADYNYKLPDDFTGCVIAWNSNNLDSKVGGNYNYLYRLFRKSNLKPFERDISTEIYQAGSTPCNGVEGFNCYFPLQSYGFQPTNGVGYQPYRVVVLSFELLHAPATVCGPKKSTNLVKNKCVNFNFNGLTGTGVLTESNKKFLPFQQFGRDIADTTDAVRDPQTLEILDITPCSFGGVSVITPGTNTSNQVAVLYQDVNCTEVPVAIHADQLTPTWRVYSTGSNVFQTRAGCLIGAEHVNNSYECDIPIGAGICASYQTQTNSPGSASSVASQSIIAYTMSLGAENSVAYSNNSIAIPTNFTISVTTEILPVSMTKTSVDCTMYICGDSTECSNLLLQYGSFCTQLNRALTGIAVEQDKNTQEVFAQVKQIYKTPPIKDFGGFNFSQILPDPSKPSKRSFIEDLLFNKVTLADAGFIKQYGDCLGDIAARDLICAQKFNGLTVLPPLLTDEMIAQYTSALLAGTITSGWTFGAGAALQIPFAMQMAYRFNGIGVTQNVLYENQKLIANQFNSAIGKIQDSLSSTASALGKLQDVVNQNAQALNTLVKQLSSNFGAISSVLNDILSRLDPPEAEVQIDRLITGRLQSLQTYVTQQLIRAAEIRASANLAATKMSECVLGQSKRVDFCGKGYHLMSFPQSAPHGVVFLHVTYVPAQEKNFTTAPAICHDGKAHFPREGVFVSNGTHWFVTQRNFYEPQIITTDNTFVSGNCDVVIGIVNNTVYDPLQSELDSIKEELDKIHKNGSGGSGDIIKLLNEQVNKEMQSSNLYMSMSSWCYTHSLDGAGLFLFDHAAEEYEHAKKLIIFLNENNVPVQLTSISAPEHKFEGLTQIFQKAYEHEQHISESINNIVDHAIKSKDHATFNFLQWYVAEQHEEEVLFKDILDKIELIGNENHGLYLADQYVKGIAKSRKSGS

SEQ ID NO: 192 - protein, 1705 aa, synthetic construct
NITNLCPFDKVFNATRFPSVYAWERTKISDCVADYTVFYNSTSFSTFNCYGVSPSKLIDLCFTSVYADTFLIRFSEVRQVAPGQTGVIADYNYKLPDDFTGCVIAWNTAKQDVGSYFYRSHRSSKLKPFERDLSSEENGVRTLSTYDFNQYVPLEYQATRVVVLSFELLNAPATVCGPGSGGSGNITNLCPFDEVFNATRFASVYAWNRKRISNCVADYSVLYNFAPFFAFKCYGVSPTKLNDLCFTNVYADSFVIRGNEVSQIAPGQTGNIADYNYKLPDDFTGCVIAWNSNKLDSKVGGNYNYRYRLFRKSNLKPFERDISTEIYQAGNKPCNGVAGVNCYFPLQSYGFRPTYGVGHQPYRVVVLSFELLHAPATVCGPGSGGSGSSQCVNLTTRTQLPPAYTNSFTRGVYYPDKVFRSSVLHSTQDLFLPFFSNVTWFHAIHVSGTNGTKRFDNPVLPFNDGVYFASTEKSNIIRGWIFGTTLDSKTQSLLIVNNATNVVIKVCEFQFCNDPFLGVYYHKNNKSWMESEFRVYSSANNCTFEYVSQPFLMDLEGKQGNFKNLREFVFKNIDGYFKIYSKHTPINLVRDLPQGFSALEPLVDLPIGINITRFQTLLALHRSYLTPGDSSSGWTAGAAAYYVGYLQPRTFLLKYNENGTITDAVDCALDPLSETKCTLKSFTVEKGIYQTSNFRVQPTESIVRFPNITNLCPFGEVFNATRFASVYAWNRKRISNCVADYSVLYNSASFSTFKCYGVSPTKLNDLCFTNVYADSFVIRGDEVRQIAPGQTGKIADYNYKLPDDFTGCVIAWNSNNLDSKVGGNYNYLYRLFRKSNLKPFERDISTEIYQAGSTPCNGVEGFNCYFPLQSYGFQPTNGVGYQPYRVVVLSFELLHAPATVCGPKKSTNLVKNKCVNFNFNGLTGTGVLTESNKKFLPFQQFGRDIADTTDAVRDPQTLEILDITPCSFGGVSVITPGTNTSNQVAVLYQDVNCTEVPVAIHADQLTPTWRVYSTGSNVFQTRAGCLIGAEHVNNSYECDIPIGAGICASYQTQTNSPGSASSVASQSIIAYTMSLGAENSVAYSNNSIAIPTNFTISVTTEILPVSMTKTSVDCTMYICGDSTECSNLLLQYGSFCTQLNRALTGIAVEQDKNTQEVFAQVKQIYKTPPIKDFGGFNFSQILPDPSKPSKRSFIEDLLFNKVTLADAGFIKQYGDCLGDIAARDLICAQKFNGLTVLPPLLTDEMIAQYTSALLAGTITSGWTFGAGAALQIPFAMQMAYRFNGIGVTQNVLYENQKLIANQFNSAIGKIQDSLSSTASALGKLQDVVNQNAQALNTLVKQLSSNFGAISSVLNDILSRLDPPEAEVQIDRLITGRLQSLQTYVTQQLIRAAEIRASANLAATKMSECVLGQSKRVDFCGKGYHLMSFPQSAPHGVVFLHVTYVPAQEKNFTTAPAICHDGKAHFPREGVFVSNGTHWFVTQRNFYEPQIITTDNTFVSGNCDVVIGIVNNTVYDPLQSELDSIKEELDKIHKNGSGGSGDIIKLLNEQVNKEMQSSNLYMSMSSWCYTHSLDGAGLFLFDHAAEEYEHAKKLIIFLNENNVPVQLTSISAPEHKFEGLTQIFQKAYEHEQHISESINNIVDHAIKSKDHATFNFLQWYVAEQHEEEVLFKDILDKIELIGNENHGLYLADQYVKGIAKSRKSGS

SEQ ID NO: 193 - protein, 1705 aa, synthetic construct
NITNRCPFDKVFNATRFPNVYAWERTKISDCVADYTVLYNSTSFSTFKCYGVSPSKLIDLCFTSVYADTFLIRSSEVRQVAPGETGVIADYNYKLPDDFTGCVIAWNTAKQDQGQYYYRSHRKTKLKPFERDLSSDENGVRTLSTYDFYPSVPVAYQATRVVVLSFELLNAPATVCGPGSGGSGNITNLCPFDEVFNATRFASVYAWNRKRISNCVADYSVLYNFAPFFAFKCYGVSPTKLNDLCFTNVYADSFVIRGNEVSQIAPGQTGNIADYNYKLPDDFTGCVIAWNSNKLDSKVGGNYNYRYRLFRKSNLKPFERDISTEIYQAGNKPCNGVAGVNCYFPLQSYGFRPTYGVGHQPYRVVVLSFELLHAPATVCGPGSGGSGSSQCVNLTTRTQLPPAYTNSFTRGVYYPDKVFRSSVLHSTQDLFLPFFSNVTWFHAIHVSGTNGTKRFDNPVLPFNDGVYFASTEKSNIIRGWIFGTTLDSKTQSLLIVNNATNVVIKVCEFQFCNDPFLGVYYHKNNKSWMESEFRVYSSANNCTFEYVSQPFLMDLEGKQGNFKNLREFVFKNIDGYFKIYSKHTPINLVRDLPQGFSALEPLVDLPIGINITRFQTLLALHRSYLTPGDSSSGWTAGAAAYYVGYLQPRTFLLKYNENGTITDAVDCALDPLSETKCTLKSFTVEKGIYQTSNFRVQPTESIVRFPNITNLCPFGEVFNATRFASVYAWNRKRISNCVADYSVLYNSASFSTFKCYGVSPTKLNDLCFTNVYADSFVIRGDEVRQIAPGQTGKIADYNYKLPDDFTGCVIAWNSNNLDSKVGGNYNYLYRLFRKSNLKPFERDISTEIYQAGSTPCNGVEGFNCYFPLQSYGFQPTNGVGYQPYRVVVLSFELLHAPATVCGPKKSTNLVKNKCVNFNFNGLTGTGVLTESNKKFLPFQQFGRDIADTTDAVRDPQTLEILDITPCSFGGVSVITPGTNTSNQVAVLYQDVNCTEVPVAIHADQLTPTWRVYSTGSNVFQTRAGCLIGAEHVNNSYECDIPIGAGICASYQTQTNSPGSASSVASQSIIAYTMSLGAENSVAYSNNSIAIPTNFTISVTTEILPVSMTKTSVDCTMYICGDSTECSNLLLQYGSFCTQLNRALTGIAVEQDKNTQEVFAQVKQIYKTPPIKDFGGFNFSQILPDPSKPSKRSFIEDLLFNKVTLADAGFIKQYGDCLGDIAARDLICAQKFNGLTVLPPLLTDEMIAQYTSALLAGTITSGWTFGAGAALQIPFAMQMAYRFNGIGVTQNVLYENQKLIANQFNSAIGKIQDSLSSTASALGKLQDVVNQNAQALNTLVKQLSSNFGAISSVLNDILSRLDPPEAEVQIDRLITGRLQSLQTYVTQQLIRAAEIRASANLAATKMSECVLGQSKRVDFCGKGYHLMSFPQSAPHGVVFLHVTYVPAQEKNFTTAPAICHDGKAHFPREGVFVSNGTHWFVTQRNFYEPQIITTDNTFVSGNCDVVIGIVNNTVYDPLQSELDSIKEELDKIHKNGSGGSGDIIKLLNEQVNKEMQSSNLYMSMSSWCYTHSLDGAGLFLFDHAAEEYEHAKKLIIFLNENNVPVQLTSISAPEHKFEGLTQIFQKAYEHEQHISESINNIVDHAIKSKDHATFNFLQWYVAEQHEEEVLFKDILDKIELIGNENHGLYLADQYVKGIAKSRKSGS

SEQ ID NO: 194 - protein, 1705 aa, synthetic construct
NITNRCPFDKVFNASRFPNVYAWERTKISDCVADYTVLYNSTSFSTFKCYGVSPSKLIDLCFTSVYADTFLIRSSEVRQVAPGETGVIADYNYKLPDDFTGCVIAWNTAKQDQGQYYYRSSRKTKLKPFERDLTSDENGVRTLSTYDFYPNVPIEYQATRVVVLSFELLNAPATVCGPGSGGSGNITNLCPFDEVFNATRFASVYAWNRKRISNCVADYSVLYNFAPFFAFKCYGVSPTKLNDLCFTNVYADSFVIRGNEVSQIAPGQTGNIADYNYKLPDDFTGCVIAWNSNKLDSKVGGNYNYRYRLFRKSNLKPFERDISTEIYQAGNKPCNGVAGVNCYFPLQSYGFRPTYGVGHQPYRVVVLSFELLHAPATVCGPGSGGSGSSQCVNLTTRTQLPPAYTNSFTRGVYYPDKVFRSSVLHSTQDLFLPFFSNVTWFHAIHVSGTNGTKRFDNPVLPFNDGVYFASTEKSNIIRGWIFGTTLDSKTQSLLIVNNATNVVIKVCEFQFCNDPFLGVYYHKNNKSWMESEFRVYSSANNCTFEYVSQPFLMDLEGKQGNFKNLREFVFKNIDGYFKIYSKHTPINLVRDLPQGFSALEPLVDLPIGINITRFQTLLALHRSYLTPGDSSSGWTAGAAAYYVGYLQPRTFLLKYNENGTITDAVDCALDPLSETKCTLKSFTVEKGIYQTSNFRVQPTESIVRFPNITNLCPFGEVFNATRFASVYAWNRKRISNCVADYSVLYNSASFSTFKCYGVSPTKLNDLCFTNVYADSFVIRGDEVRQIAPGQTGKIADYNYKLPDDFTGCVIAWNSNNLDSKVGGNYNYLYRLFRKSNLKPFERDISTEIYQAGSTPCNGVEGFNCYFPLQSYGFQPTNGVGYQPYRVVVLSFELLHAPATVCGPKKSTNLVKNKCVNFNFNGLTGTGVLTESNKKFLPFQQFGRDIADTTDAVRDPQTLEILDITPCSFGGVSVITPGTNTSNQVAVLYQDVNCTEVPVAIHADQLTPTWRVYSTGSNVFQTRAGCLIGAEHVNNSYECDIPIGAGICASYQTQTNSPGSASSVASQSIIAYTMSLGAENSVAYSNNSIAIPTNFTISVTTEILPVSMTKTSVDCTMYICGDSTECSNLLLQYGSFCTQLNRALTGIAVEQDKNTQEVFAQVKQIYKTPPIKDFGGFNFSQILPDPSKPSKRSFIEDLLFNKVTLADAGFIKQYGDCLGDIAARDLICAQKFNGLTVLPPLLTDEMIAQYTSALLAGTITSGWTFGAGAALQIPFAMQMAYRFNGIGVTQNVLYENQKLIANQFNSAIGKIQDSLSSTASALGKLQDVVNQNAQALNTLVKQLSSNFGAISSVLNDILSRLDPPEAEVQIDRLITGRLQSLQTYVTQQLIRAAEIRASANLAATKMSECVLGQSKRVDFCGKGYHLMSFPQSAPHGVVFLHVTYVPAQEKNFTTAPAICHDGKAHFPREGVFVSNGTHWFVTQRNFYEPQIITTDNTFVSGNCDVVIGIVNNTVYDPLQSELDSIKEELDKIHKNGSGGSGDIIKLLNEQVNKEMQSSNLYMSMSSWCYTHSLDGAGLFLFDHAAEEYEHAKKLIIFLNENNVPVQLTSISAPEHKFEGLTQIFQKAYEHEQHISESINNIVDHAIKSKDHATFNFLQWYVAEQHEEEVLFKDILDKIELIGNENHGLYLADQYVKGIAKSRKSGS

SEQ ID NO: 195 - protein, 1720 aa, synthetic construct
NITNLCPFSQVFNATRFPSVYAWTRERISNCIADYSVLYNSTSFSTFRCYGVSPTKLNDLCFSNVYADSMVVRGDEVRQIAPSQTGVIADYNYKLPDDFTGCVIAWNSKAKDENGQYFYRLFRKSKLLPFQRDVSNVTYGSGKNDGCNPSEADCYWPLLKYGFTSSVSQDYQPYRVVVLSFELLNAPATVCGPGSGGSGNITNLCPFDEVFNATRFASVYAWNRKRISNCVADYSVLYNFAPFFAFKCYGVSPTKLNDLCFTNVYADSFVIRGNEVSQIAPGQTGNIADYNYKLPDDFTGCVIAWNSNKLDSKVGGNYNYRYRLFRKSNLKPFERDISTEIYQAGNKPCNGVAGVNCYFPLQSYGFRPTYGVGHQPYRVVVLSFELLHAPATVCGPGSGGSGSSQCVNLTTRTQLPPAYTNSFTRGVYYPDKVFRSSVLHSTQDLFLPFFSNVTWFHAIHVSGTNGTKRFDNPVLPFNDGVYFASTEKSNIIRGWIFGTTLDSKTQSLLIVNNATNVVIKVCEFQFCNDPFLGVYYHKNNKSWMESEFRVYSSANNCTFEYVSQPFLMDLEGKQGNFKNLREFVFKNIDGYFKIYSKHTPINLVRDLPQGFSALEPLVDLPIGINITRFQTLLALHRSYLTPGDSSSGWTAGAAAYYVGYLQPRTFLLKYNENGTITDAVDCALDPLSETKCTLKSFTVEKGIYQTSNFRVQPTESIVRFPNITNLCPFGEVFNATRFASVYAWNRKRISNCVADYSVLYNSASFSTFKCYGVSPTKLNDLCFTNVYADSFVIRGDEVRQIAPGQTGKIADYNYKLPDDFTGCVIAWNSNNLDSKVGGNYNYLYRLFRKSNLKPFERDISTEIYQAGSTPCNGVEGFNCYFPLQSYGFQPTNGVGYQPYRVVVLSFELLHAPATVCGPKKSTNLVKNKCVNFNFNGLTGTGVLTESNKKFLPFQQFGRDIADTTDAVRDPQTLEILDITPCSFGGVSVITPGTNTSNQVAVLYQDVNCTEVPVAIHADQLTPTWRVYSTGSNVFQTRAGCLIGAEHVNNSYECDIPIGAGICASYQTQTNSPGSASSVASQSIIAYTMSLGAENSVAYSNNSIAIPTNFTISVTTEILPVSMTKTSVDCTMYICGDSTECSNLLLQYGSFCTQLNRALTGIAVEQDKNTQEVFAQVKQIYKTPPIKDFGGFNFSQILPDPSKPSKRSFIEDLLFNKVTLADAGFIKQYGDCLGDIAARDLICAQKFNGLTVLPPLLTDEMIAQYTSALLAGTITSGWTFGAGAALQIPFAMQMAYRFNGIGVTQNVLYENQKLIANQFNSAIGKIQDSLSSTASALGKLQDVVNQNAQALNTLVKQLSSNFGAISSVLNDILSRLDPPEAEVQIDRLITGRLQSLQTYVTQQLIRAAEIRASANLAATKMSECVLGQSKRVDFCGKGYHLMSFPQSAPHGVVFLHVTYVPAQEKNFTTAPAICHDGKAHFPREGVFVSNGTHWFVTQRNFYEPQIITTDNTFVSGNCDVVIGIVNNTVYDPLQSELDSIKEELDKIHKNGSGGSGDIIKLLNEQVNKEMQSSNLYMSMSSWCYTHSLDGAGLFLFDHAAEEYEHAKKLIIFLNENNVPVQLTSISAPEHKFEGLTQIFQKAYEHEQHISESINNIVDHAIKSKDHATFNFLQWYVAEQHEEEVLFKDILDKIELIGNENHGLYLADQYVKGIAKSRKSGS

SEQ ID NO: 196 - protein, 1720 aa, synthetic construct
NITNLCPFSQVFNATRFPSVYAWTRERISNCIADYSVLYNSTSFSTFRCYGVSPTKLNDLCFSNVYADSMVVRGDEVRQIAPSQTGVIADYNYKLPDDFTGCVIAWNSKAKDENGQYFYRLFRKSKLLPFQRDVSNVTYGSGKNDGCNPSEADCYWPLLKYGFWSSVSQDYQPYRVVVLSFELLNAPATVCGPGSGGSGNITNLCPFDEVFNATRFASVYAWNRKRISNCVADYSVLYNFAPFFAFKCYGVSPTKLNDLCFTNVYADSFVIRGNEVSQIAPGQTGNIADYNYKLPDDFTGCVIAWNSNKLDSKVGGNYNYRYRLFRKSNLKPFERDISTEIYQAGNKPCNGVAGVNCYFPLQSYGFRPTYGVGHQPYRVVVLSFELLHAPATVCGPGSGGSGSSQCVNLTTRTQLPPAYTNSFTRGVYYPDKVFRSSVLHSTQDLFLPFFSNVTWFHAIHVSGTNGTKRFDNPVLPFNDGVYFASTEKSNIIRGWIFGTTLDSKTQSLLIVNNATNVVIKVCEFQFCNDPFLGVYYHKNNKSWMESEFRVYSSANNCTFEYVSQPFLMDLEGKQGNFKNLREFVFKNIDGYFKIYSKHTPINLVRDLPQGFSALEPLVDLPIGINITRFQTLLALHRSYLTPGDSSSGWTAGAAAYYVGYLQPRTFLLKYNENGTITDAVDCALDPLSETKCTLKSFTVEKGIYQTSNFRVQPTESIVRFPNITNLCPFGEVFNATRFASVYAWNRKRISNCVADYSVLYNSASFSTFKCYGVSPTKLNDLCFTNVYADSFVIRGDEVRQIAPGQTGKIADYNYKLPDDFTGCVIAWNSNNLDSKVGGNYNYLYRLFRKSNLKPFERDISTEIYQAGSTPCNGVEGFNCYFPLQSYGFQPTNGVGYQPYRVVVLSFELLHAPATVCGPKKSTNLVKNKCVNFNFNGLTGTGVLTESNKKFLPFQQFGRDIADTTDAVRDPQTLEILDITPCSFGGVSVITPGTNTSNQVAVLYQDVNCTEVPVAIHADQLTPTWRVYSTGSNVFQTRAGCLIGAEHVNNSYECDIPIGAGICASYQTQTNSPGSASSVASQSIIAYTMSLGAENSVAYSNNSIAIPTNFTISVTTEILPVSMTKTSVDCTMYICGDSTECSNLLLQYGSFCTQLNRALTGIAVEQDKNTQEVFAQVKQIYKTPPIKDFGGFNFSQILPDPSKPSKRSFIEDLLFNKVTLADAGFIKQYGDCLGDIAARDLICAQKFNGLTVLPPLLTDEMIAQYTSALLAGTITSGWTFGAGAALQIPFAMQMAYRFNGIGVTQNVLYENQKLIANQFNSAIGKIQDSLSSTASALGKLQDVVNQNAQALNTLVKQLSSNFGAISSVLNDILSRLDPPEAEVQIDRLITGRLQSLQTYVTQQLIRAAEIRASANLAATKMSECVLGQSKRVDFCGKGYHLMSFPQSAPHGVVFLHVTYVPAQEKNFTTAPAICHDGKAHFPREGVFVSNGTHWFVTQRNFYEPQIITTDNTFVSGNCDVVIGIVNNTVYDPLQSELDSIKEELDKIHKNGSGGSGDIIKLLNEQVNKEMQSSNLYMSMSSWCYTHSLDGAGLFLFDHAAEEYEHAKKLIIFLNENNVPVQLTSISAPEHKFEGLTQIFQKAYEHEQHISESINNIVDHAIKSKDHATFNFLQWYVAEQHEEEVLFKDILDKIELIGNENHGLYLADQYVKGIAKSRKSGS

SEQ ID NO: 197 - protein, 1720 aa, synthetic construct
NITNLCPFSQVFNATRFPSVYAWTRERISNCIADYSVLYNSTSFSTFRCYGVSPTKLNDLCFSNVYADSMVVRGDEVRQIAPSQTGVIADYNYKLPDDFTGCVIAWNSKAKDENGQYFYRLFRKSKLLPFQRDVSNVTYGSGKNDGCNPSEADCYWPLYKYGFWSSVSQDYQPYRVVVLSFELLNAPATVCGPGSGGSGNITNLCPFDEVFNATRFASVYAWNRKRISNCVADYSVLYNFAPFFAFKCYGVSPTKLNDLCFTNVYADSFVIRGNEVSQIAPGQTGNIADYNYKLPDDFTGCVIAWNSNKLDSKVGGNYNYRYRLFRKSNLKPFERDISTEIYQAGNKPCNGVAGVNCYFPLQSYGFRPTYGVGHQPYRVVVLSFELLHAPATVCGPGSGGSGSSQCVNLTTRTQLPPAYTNSFTRGVYYPDKVFRSSVLHSTQDLFLPFFSNVTWFHAIHVSGTNGTKRFDNPVLPFNDGVYFASTEKSNIIRGWIFGTTLDSKTQSLLIVNNATNVVIKVCEFQFCNDPFLGVYYHKNNKSWMESEFRVYSSANNCTFEYVSQPFLMDLEGKQGNFKNLREFVFKNIDGYFKIYSKHTPINLVRDLPQGFSALEPLVDLPIGINITRFQTLLALHRSYLTPGDSSSGWTAGAAAYYVGYLQPRTFLLKYNENGTITDAVDCALDPLSETKCTLKSFTVEKGIYQTSNFRVQPTESIVRFPNITNLCPFGEVFNATRFASVYAWNRKRISNCVADYSVLYNSASFSTFKCYGVSPTKLNDLCFTNVYADSFVIRGDEVRQIAPGQTGKIADYNYKLPDDFTGCVIAWNSNNLDSKVGGNYNYLYRLFRKSNLKPFERDISTEIYQAGSTPCNGVEGFNCYFPLQSYGFQPTNGVGYQPYRVVVLSFELLHAPATVCGPKKSTNLVKNKCVNFNFNGLTGTGVLTESNKKFLPFQQFGRDIADTTDAVRDPQTLEILDITPCSFGGVSVITPGTNTSNQVAVLYQDVNCTEVPVAIHADQLTPTWRVYSTGSNVFQTRAGCLIGAEHVNNSYECDIPIGAGICASYQTQTNSPGSASSVASQSIIAYTMSLGAENSVAYSNNSIAIPTNFTISVTTEILPVSMTKTSVDCTMYICGDSTECSNLLLQYGSFCTQLNRALTGIAVEQDKNTQEVFAQVKQIYKTPPIKDFGGFNFSQILPDPSKPSKRSFIEDLLFNKVTLADAGFIKQYGDCLGDIAARDLICAQKFNGLTVLPPLLTDEMIAQYTSALLAGTITSGWTFGAGAALQIPFAMQMAYRFNGIGVTQNVLYENQKLIANQFNSAIGKIQDSLSSTASALGKLQDVVNQNAQALNTLVKQLSSNFGAISSVLNDILSRLDPPEAEVQIDRLITGRLQSLQTYVTQQLIRAAEIRASANLAATKMSECVLGQSKRVDFCGKGYHLMSFPQSAPHGVVFLHVTYVPAQEKNFTTAPAICHDGKAHFPREGVFVSNGTHWFVTQRNFYEPQIITTDNTFVSGNCDVVIGIVNNTVYDPLQSELDSIKEELDKIHKNGSGGSGDIIKLLNEQVNKEMQSSNLYMSMSSWCYTHSLDGAGLFLFDHAAEEYEHAKKLIIFLNENNVPVQLTSISAPEHKFEGLTQIFQKAYEHEQHISESINNIVDHAIKSKDHATFNFLQWYVAEQHEEEVLFKDILDKIELIGNENHGLYLADQYVKGIAKSRKSGS

SEQ ID NO: 198 - protein, 1721 aa, synthetic construct
NMTNICPFDQVFNKTQFPSVYAWERVRISDCVSDYTVLYNSSASFSTFKCYGVSPTKLNDLCFSGVYADYFVVKGDHVHQIAPGQTGVIADYNYKLPSEFVGCILAWNTRTIDSKRGFYYRLFRHGNIRPYERDTSNVPYNAAGGTCNQPGTHNCYEPLQDYGFTSTSGVGYQPFRVVVLSFELLNAPATVCGPGSGGSGNITNLCPFDEVFNATRFASVYAWNRKRISNCVADYSVLYNFAPFFAFKCYGVSPTKLNDLCFTNVYADSFVIRGNEVSQIAPGQTGNIADYNYKLPDDFTGCVIAWNSNKLDSKVGGNYNYRYRLFRKSNLKPFERDISTEIYQAGNKPCNGVAGVNCYFPLQSYGFRPTYGVGHQPYRVVVLSFELLHAPATVCGPGSGGSGSSQCVNLTTRTQLPPAYTNSFTRGVYYPDKVFRSSVLHSTQDLFLPFFSNVTWFHAIHVSGTNGTKRFDNPVLPFNDGVYFASTEKSNIIRGWIFGTTLDSKTQSLLIVNNATNVVIKVCEFQFCNDPFLGVYYHKNNKSWMESEFRVYSSANNCTFEYVSQPFLMDLEGKQGNFKNLREFVFKNIDGYFKIYSKHTPINLVRDLPQGFSALEPLVDLPIGINITRFQTLLALHRSYLTPGDSSSGWTAGAAAYYVGYLQPRTFLLKYNENGTITDAVDCALDPLSETKCTLKSFTVEKGIYQTSNFRVQPTESIVRFPNITNLCPFGEVFNATRFASVYAWNRKRISNCVADYSVLYNSASFSTFKCYGVSPTKLNDLCFTNVYADSFVIRGDEVRQIAPGQTGKIADYNYKLPDDFTGCVIAWNSNNLDSKVGGNYNYLYRLFRKSNLKPFERDISTEIYQAGSTPCNGVEGFNCYFPLQSYGFQPTNGVGYQPYRVVVLSFELLHAPATVCGPKKSTNLVKNKCVNFNFNGLTGTGVLTESNKKFLPFQQFGRDIADTTDAVRDPQTLEILDITPCSFGGVSVITPGTNTSNQVAVLYQDVNCTEVPVAIHADQLTPTWRVYSTGSNVFQTRAGCLIGAEHVNNSYECDIPIGAGICASYQTQTNSPGSASSVASQSIIAYTMSLGAENSVAYSNNSIAIPTNFTISVTTEILPVSMTKTSVDCTMYICGDSTECSNLLLQYGSFCTQLNRALTGIAVEQDKNTQEVFAQVKQIYKTPPIKDFGGFNFSQILPDPSKPSKRSFIEDLLFNKVTLADAGFIKQYGDCLGDIAARDLICAQKFNGLTVLPPLLTDEMIAQYTSALLAGTITSGWTFGAGAALQIPFAMQMAYRFNGIGVTQNVLYENQKLIANQFNSAIGKIQDSLSSTASALGKLQDVVNQNAQALNTLVKQLSSNFGAISSVLNDILSRLDPPEAEVQIDRLITGRLQSLQTYVTQQLIRAAEIRASANLAATKMSECVLGQSKRVDFCGKGYHLMSFPQSAPHGVVFLHVTYVPAQEKNFTTAPAICHDGKAHFPREGVFVSNGTHWFVTQRNFYEPQIITTDNTFVSGNCDVVIGIVNNTVYDPLQSELDSIKEELDKIHKNGSGGSGDIIKLLNEQVNKEMQSSNLYMSMSSWCYTHSLDGAGLFLFDHAAEEYEHAKKLIIFLNENNVPVQLTSISAPEHKFEGLTQIFQKAYEHEQHISESINNIVDHAIKSKDHATFNFLQWYVAEQHEEEVLFKDILDKIELIGNENHGLYLADQYVKGIAKSRKSGS

SEQ ID NO: 199 - protein, 1721 aa, synthetic construct
NMTNICPFDQVFNKTQFPSVYAWERVRISDCVSDYTVLYNSSASFSTFKCYGVSPTKLNDLCFSGVYADYFVVKGDHVHQIAPGQTGVIADYNYKLPSEFVGCILAWNTRTIDSKRGFYYRLFRHGNIRPYERDTSNVPYNAAGGTCNQPGTHNCYEPLQDYGFWSTSGVGYQPFRVVVLSFELLNAPATVCGPGSGGSGNITNLCPFDEVFNATRFASVYAWNRKRISNCVADYSVLYNFAPFFAFKCYGVSPTKLNDLCFTNVYADSFVIRGNEVSQIAPGQTGNIADYNYKLPDDFTGCVIAWNSNKLDSKVGGNYNYRYRLFRKSNLKPFERDISTEIYQAGNKPCNGVAGVNCYFPLQSYGFRPTYGVGHQPYRVVVLSFELLHAPATVCGPGSGGSGSSQCVNLTTRTQLPPAYTNSFTRGVYYPDKVFRSSVLHSTQDLFLPFFSNVTWFHAIHVSGTNGTKRFDNPVLPFNDGVYFASTEKSNIIRGWIFGTTLDSKTQSLLIVNNATNVVIKVCEFQFCNDPFLGVYYHKNNKSWMESEFRVYSSANNCTFEYVSQPFLMDLEGKQGNFKNLREFVFKNIDGYFKIYSKHTPINLVRDLPQGFSALEPLVDLPIGINITRFQTLLALHRSYLTPGDSSSGWTAGAAAYYVGYLQPRTFLLKYNENGTITDAVDCALDPLSETKCTLKSFTVEKGIYQTSNFRVQPTESIVRFPNITNLCPFGEVFNATRFASVYAWNRKRISNCVADYSVLYNSASFSTFKCYGVSPTKLNDLCFTNVYADSFVIRGDEVRQIAPGQTGKIADYNYKLPDDFTGCVIAWNSNNLDSKVGGNYNYLYRLFRKSNLKPFERDISTEIYQAGSTPCNGVEGFNCYFPLQSYGFQPTNGVGYQPYRVVVLSFELLHAPATVCGPKKSTNLVKNKCVNFNFNGLTGTGVLTESNKKFLPFQQFGRDIADTTDAVRDPQTLEILDITPCSFGGVSVITPGTNTSNQVAVLYQDVNCTEVPVAIHADQLTPTWRVYSTGSNVFQTRAGCLIGAEHVNNSYECDIPIGAGICASYQTQTNSPGSASSVASQSIIAYTMSLGAENSVAYSNNSIAIPTNFTISVTTEILPVSMTKTSVDCTMYICGDSTECSNLLLQYGSFCTQLNRALTGIAVEQDKNTQEVFAQVKQIYKTPPIKDFGGFNFSQILPDPSKPSKRSFIEDLLFNKVTLADAGFIKQYGDCLGDIAARDLICAQKFNGLTVLPPLLTDEMIAQYTSALLAGTITSGWTFGAGAALQIPFAMQMAYRFNGIGVTQNVLYENQKLIANQFNSAIGKIQDSLSSTASALGKLQDVVNQNAQALNTLVKQLSSNFGAISSVLNDILSRLDPPEAEVQIDRLITGRLQSLQTYVTQQLIRAAEIRASANLAATKMSECVLGQSKRVDFCGKGYHLMSFPQSAPHGVVFLHVTYVPAQEKNFTTAPAICHDGKAHFPREGVFVSNGTHWFVTQRNFYEPQIITTDNTFVSGNCDVVIGIVNNTVYDPLQSELDSIKEELDKIHKNGSGGSGDIIKLLNEQVNKEMQSSNLYMSMSSWCYTHSLDGAGLFLFDHAAEEYEHAKKLIIFLNENNVPVQLTSISAPEHKFEGLTQIFQKAYEHEQHISESINNIVDHAIKSKDHATFNFLQWYVAEQHEEEVLFKDILDKIELIGNENHGLYLADQYVKGIAKSRKSGS

SEQ ID NO: 200 - protein, 1721 aa, synthetic construct
NMTNICPFDQVFNKTQFPSVYAWERVRISDCVSDYTVLYNSSASFSTFKCYGVSPTKLNDLCFSGVYADYFVVKGDHVHQIAPGQTGVIADYNYKLPSEFVGCILAWNTRTIDSKRGFYYRLFRHGNIRPYERDTSNVPYNAAGGTCNQPGTHNCYEPLYDYGFWSTSGVGYQPFRVVVLSFELLNAPATVCGPGSGGSGNITNLCPFDEVFNATRFASVYAWNRKRISNCVADYSVLYNFAPFFAFKCYGVSPTKLNDLCFTNVYADSFVIRGNEVSQIAPGQTGNIADYNYKLPDDFTGCVIAWNSNKLDSKVGGNYNYRYRLFRKSNLKPFERDISTEIYQAGNKPCNGVAGVNCYFPLQSYGFRPTYGVGHQPYRVVVLSFELLHAPATVCGPGSGGSGSSQCVNLTTRTQLPPAYTNSFTRGVYYPDKVFRSSVLHSTQDLFLPFFSNVTWFHAIHVSGTNGTKRFDNPVLPFNDGVYFASTEKSNIIRGWIFGTTLDSKTQSLLIVNNATNVVIKVCEFQFCNDPFLGVYYHKNNKSWMESEFRVYSSANNCTFEYVSQPFLMDLEGKQGNFKNLREFVFKNIDGYFKIYSKHTPINLVRDLPQGFSALEPLVDLPIGINITRFQTLLALHRSYLTPGDSSSGWTAGAAAYYVGYLQPRTFLLKYNENGTITDAVDCALDPLSETKCTLKSFTVEKGIYQTSNFRVQPTESIVRFPNITNLCPFGEVFNATRFASVYAWNRKRISNCVADYSVLYNSASFSTFKCYGVSPTKLNDLCFTNVYADSFVIRGDEVRQIAPGQTGKIADYNYKLPDDFTGCVIAWNSNNLDSKVGGNYNYLYRLFRKSNLKPFERDISTEIYQAGSTPCNGVEGFNCYFPLQSYGFQPTNGVGYQPYRVVVLSFELLHAPATVCGPKKSTNLVKNKCVNFNFNGLTGTGVLTESNKKFLPFQQFGRDIADTTDAVRDPQTLEILDITPCSFGGVSVITPGTNTSNQVAVLYQDVNCTEVPVAIHADQLTPTWRVYSTGSNVFQTRAGCLIGAEHVNNSYECDIPIGAGICASYQTQTNSPGSASSVASQSIIAYTMSLGAENSVAYSNNSIAIPTNFTISVTTEILPVSMTKTSVDCTMYICGDSTECSNLLLQYGSFCTQLNRALTGIAVEQDKNTQEVFAQVKQIYKTPPIKDFGGFNFSQILPDPSKPSKRSFIEDLLFNKVTLADAGFIKQYGDCLGDIAARDLICAQKFNGLTVLPPLLTDEMIAQYTSALLAGTITSGWTFGAGAALQIPFAMQMAYRFNGIGVTQNVLYENQKLIANQFNSAIGKIQDSLSSTASALGKLQDVVNQNAQALNTLVKQLSSNFGAISSVLNDILSRLDPPEAEVQIDRLITGRLQSLQTYVTQQLIRAAEIRASANLAATKMSECVLGQSKRVDFCGKGYHLMSFPQSAPHGVVFLHVTYVPAQEKNFTTAPAICHDGKAHFPREGVFVSNGTHWFVTQRNFYEPQIITTDNTFVSGNCDVVIGIVNNTVYDPLQSELDSIKEELDKIHKNGSGGSGDIIKLLNEQVNKEMQSSNLYMSMSSWCYTHSLDGAGLFLFDHAAEEYEHAKKLIIFLNENNVPVQLTSISAPEHKFEGLTQIFQKAYEHEQHISESINNIVDHAIKSKDHATFNFLQWYVAEQHEEEVLFKDILDKIELIGNENHGLYLADQYVKGIAKSRKSGS

SEQ ID NO: 201 - protein, 1723 aa, synthetic construct
NITNLCPFGQVFNASNFPSVYAWERLRISDCVADYAVLYNSSSSFSTFKCYGVSPTKLNDLCFSSVYADYFVVKGDDVRQIAPAQTGVIADYNYKLPDDFTGCVLAWNTNSVDSKSGNNFYYRLFRHGKIKPYERDISNVLYNSAGGTCSSISQLGCYEPLKSYGFTPTVGVGYQPYRVVVLSFELLNAPATVCGPGSGGSGNITNLCPFDEVFNATRFASVYAWNRKRISNCVADYSVLYNFAPFFAFKCYGVSPTKLNDLCFTNVYADSFVIRGNEVSQIAPGQTGNIADYNYKLPDDFTGCVIAWNSNKLDSKVGGNYNYRYRLFRKSNLKPFERDISTEIYQAGNKPCNGVAGVNCYFPLQSYGFRPTYGVGHQPYRVVVLSFELLHAPATVCGPGSGGSGSSQCVNLTTRTQLPPAYTNSFTRGVYYPDKVFRSSVLHSTQDLFLPFFSNVTWFHAIHVSGTNGTKRFDNPVLPFNDGVYFASTEKSNIIRGWIFGTTLDSKTQSLLIVNNATNVVIKVCEFQFCNDPFLGVYYHKNNKSWMESEFRVYSSANNCTFEYVSQPFLMDLEGKQGNFKNLREFVFKNIDGYFKIYSKHTPINLVRDLPQGFSALEPLVDLPIGINITRFQTLLALHRSYLTPGDSSSGWTAGAAAYYVGYLQPRTFLLKYNENGTITDAVDCALDPLSETKCTLKSFTVEKGIYQTSNFRVQPTESIVRFPNITNLCPFGEVFNATRFASVYAWNRKRISNCVADYSVLYNSASFSTFKCYGVSPTKLNDLCFTNVYADSFVIRGDEVRQIAPGQTGKIADYNYKLPDDFTGCVIAWNSNNLDSKVGGNYNYLYRLFRKSNLKPFERDISTEIYQAGSTPCNGVEGFNCYFPLQSYGFQPTNGVGYQPYRVVVLSFELLHAPATVCGPKKSTNLVKNKCVNFNFNGLTGTGVLTESNKKFLPFQQFGRDIADTTDAVRDPQTLEILDITPCSFGGVSVITPGTNTSNQVAVLYQDVNCTEVPVAIHADQLTPTWRVYSTGSNVFQTRAGCLIGAEHVNNSYECDIPIGAGICASYQTQTNSPGSASSVASQSIIAYTMSLGAENSVAYSNNSIAIPTNFTISVTTEILPVSMTKTSVDCTMYICGDSTECSNLLLQYGSFCTQLNRALTGIAVEQDKNTQEVFAQVKQIYKTPPIKDFGGFNFSQILPDPSKPSKRSFIEDLLFNKVTLADAGFIKQYGDCLGDIAARDLICAQKFNGLTVLPPLLTDEMIAQYTSALLAGTITSGWTFGAGAALQIPFAMQMAYRFNGIGVTQNVLYENQKLIANQFNSAIGKIQDSLSSTASALGKLQDVVNQNAQALNTLVKQLSSNFGAISSVLNDILSRLDPPEAEVQIDRLITGRLQSLQTYVTQQLIRAAEIRASANLAATKMSECVLGQSKRVDFCGKGYHLMSFPQSAPHGVVFLHVTYVPAQEKNFTTAPAICHDGKAHFPREGVFVSNGTHWFVTQRNFYEPQIITTDNTFVSGNCDVVIGIVNNTVYDPLQSELDSIKEELDKIHKNGSGGSGDIIKLLNEQVNKEMQSSNLYMSMSSWCYTHSLDGAGLFLFDHAAEEYEHAKKLIIFLNENNVPVQLTSISAPEHKFEGLTQIFQKAYEHEQHISESINNIVDHAIKSKDHATFNFLQWYVAEQHEEEVLFKDILDKIELIGNENHGLYLADQYVKGIAKSRKSGS

SEQ ID NO: 202 - protein, 1723 aa, synthetic construct
NITNLCPFGQVFNASNFPSVYAWERLRISDCVADYAVLYNSSSSFSTFKCYGVSPTKLNDLCFSSVYADYFVVKGDDVRQIAPAQTGVIADYNYKLPDDFTGCVLAWNTNSVDSKSGNNFYYRLFRHGKIKPYERDISNVLYNSAGGTCSSISQLGCYEPLKSYGFWPTVGVGYQPYRVVVLSFELLNAPATVCGPGSGGSGNITNLCPFDEVFNATRFASVYAWNRKRISNCVADYSVLYNFAPFFAFKCYGVSPTKLNDLCFTNVYADSFVIRGNEVSQIAPGQTGNIADYNYKLPDDFTGCVIAWNSNKLDSKVGGNYNYRYRLFRKSNLKPFERDISTEIYQAGNKPCNGVAGVNCYFPLQSYGFRPTYGVGHQPYRVVVLSFELLHAPATVCGPGSGGSGSSQCVNLTTRTQLPPAYTNSFTRGVYYPDKVFRSSVLHSTQDLFLPFFSNVTWFHAIHVSGTNGTKRFDNPVLPFNDGVYFASTEKSNIIRGWIFGTTLDSKTQSLLIVNNATNVVIKVCEFQFCNDPFLGVYYHKNNKSWMESEFRVYSSANNCTFEYVSQPFLMDLEGKQGNFKNLREFVFKNIDGYFKIYSKHTPINLVRDLPQGFSALEPLVDLPIGINITRFQTLLALHRSYLTPGDSSSGWTAGAAAYYVGYLQPRTFLLKYNENGTITDAVDCALDPLSETKCTLKSFTVEKGIYQTSNFRVQPTESIVRFPNITNLCPFGEVFNATRFASVYAWNRKRISNCVADYSVLYNSASFSTFKCYGVSPTKLNDLCFTNVYADSFVIRGDEVRQIAPGQTGKIADYNYKLPDDFTGCVIAWNSNNLDSKVGGNYNYLYRLFRKSNLKPFERDISTEIYQAGSTPCNGVEGFNCYFPLQSYGFQPTNGVGYQPYRVVVLSFELLHAPATVCGPKKSTNLVKNKCVNFNFNGLTGTGVLTESNKKFLPFQQFGRDIADTTDAVRDPQTLEILDITPCSFGGVSVITPGTNTSNQVAVLYQDVNCTEVPVAIHADQLTPTWRVYSTGSNVFQTRAGCLIGAEHVNNSYECDIPIGAGICASYQTQTNSPGSASSVASQSIIAYTMSLGAENSVAYSNNSIAIPTNFTISVTTEILPVSMTKTSVDCTMYICGDSTECSNLLLQYGSFCTQLNRALTGIAVEQDKNTQEVFAQVKQIYKTPPIKDFGGFNFSQILPDPSKPSKRSFIEDLLFNKVTLADAGFIKQYGDCLGDIAARDLICAQKFNGLTVLPPLLTDEMIAQYTSALLAGTITSGWTFGAGAALQIPFAMQMAYRFNGIGVTQNVLYENQKLIANQFNSAIGKIQDSLSSTASALGKLQDVVNQNAQALNTLVKQLSSNFGAISSVLNDILSRLDPPEAEVQIDRLITGRLQSLQTYVTQQLIRAAEIRASANLAATKMSECVLGQSKRVDFCGKGYHLMSFPQSAPHGVVFLHVTYVPAQEKNFTTAPAICHDGKAHFPREGVFVSNGTHWFVTQRNFYEPQIITTDNTFVSGNCDVVIGIVNNTVYDPLQSELDSIKEELDKIHKNGSGGSGDIIKLLNEQVNKEMQSSNLYMSMSSWCYTHSLDGAGLFLFDHAAEEYEHAKKLIIFLNENNVPVQLTSISAPEHKFEGLTQIFQKAYEHEQHISESINNIVDHAIKSKDHATFNFLQWYVAEQHEEEVLFKDILDKIELIGNENHGLYLADQYVKGIAKSRKSGS

SEQ ID NO: 203 - protein, 1723 aa, synthetic construct
NITNLCPFGQVFNASNFPSVYAWERLRISDCVADYAVLYNSSSSFSTFKCYGVSPTKLNDLCFSSVYADYFVVKGDDVRQIAPAQTGVIADYNYKLPDDFTGCVLAWNTNSVDSKSGNNFYYRLFRHGKIKPYERDISNVLYNSAGGTCSSISQLGCYEPLYSYGFWPTVGVGYQPYRVVVLSFELLNAPATVCGPGSGGSGNITNLCPFDEVFNATRFASVYAWNRKRISNCVADYSVLYNFAPFFAFKCYGVSPTKLNDLCFTNVYADSFVIRGNEVSQIAPGQTGNIADYNYKLPDDFTGCVIAWNSNKLDSKVGGNYNYRYRLFRKSNLKPFERDISTEIYQAGNKPCNGVAGVNCYFPLQSYGFRPTYGVGHQPYRVVVLSFELLHAPATVCGPGSGGSGSSQCVNLTTRTQLPPAYTNSFTRGVYYPDKVFRSSVLHSTQDLFLPFFSNVTWFHAIHVSGTNGTKRFDNPVLPFNDGVYFASTEKSNIIRGWIFGTTLDSKTQSLLIVNNATNVVIKVCEFQFCNDPFLGVYYHKNNKSWMESEFRVYSSANNCTFEYVSQPFLMDLEGKQGNFKNLREFVFKNIDGYFKIYSKHTPINLVRDLPQGFSALEPLVDLPIGINITRFQTLLALHRSYLTPGDSSSGWTAGAAAYYVGYLQPRTFLLKYNENGTITDAVDCALDPLSETKCTLKSFTVEKGIYQTSNFRVQPTESIVRFPNITNLCPFGEVFNATRFASVYAWNRKRISNCVADYSVLYNSASFSTFKCYGVSPTKLNDLCFTNVYADSFVIRGDEVRQIAPGQTGKIADYNYKLPDDFTGCVIAWNSNNLDSKVGGNYNYLYRLFRKSNLKPFERDISTEIYQAGSTPCNGVEGFNCYFPLQSYGFQPTNGVGYQPYRVVVLSFELLHAPATVCGPKKSTNLVKNKCVNFNFNGLTGTGVLTESNKKFLPFQQFGRDIADTTDAVRDPQTLEILDITPCSFGGVSVITPGTNTSNQVAVLYQDVNCTEVPVAIHADQLTPTWRVYSTGSNVFQTRAGCLIGAEHVNNSYECDIPIGAGICASYQTQTNSPGSASSVASQSIIAYTMSLGAENSVAYSNNSIAIPTNFTISVTTEILPVSMTKTSVDCTMYICGDSTECSNLLLQYGSFCTQLNRALTGIAVEQDKNTQEVFAQVKQIYKTPPIKDFGGFNFSQILPDPSKPSKRSFIEDLLFNKVTLADAGFIKQYGDCLGDIAARDLICAQKFNGLTVLPPLLTDEMIAQYTSALLAGTITSGWTFGAGAALQIPFAMQMAYRFNGIGVTQNVLYENQKLIANQFNSAIGKIQDSLSSTASALGKLQDVVNQNAQALNTLVKQLSSNFGAISSVLNDILSRLDPPEAEVQIDRLITGRLQSLQTYVTQQLIRAAEIRASANLAATKMSECVLGQSKRVDFCGKGYHLMSFPQSAPHGVVFLHVTYVPAQEKNFTTAPAICHDGKAHFPREGVFVSNGTHWFVTQRNFYEPQIITTDNTFVSGNCDVVIGIVNNTVYDPLQSELDSIKEELDKIHKNGSGGSGDIIKLLNEQVNKEMQSSNLYMSMSSWCYTHSLDGAGLFLFDHAAEEYEHAKKLIIFLNENNVPVQLTSISAPEHKFEGLTQIFQKAYEHEQHISESINNIVDHAIKSKDHATFNFLQWYVAEQHEEEVLFKDILDKIELIGNENHGLYLADQYVKGIAKSRKSGS

SEQ ID NO: 204 - protein, 1720 aa, synthetic construct
NITNLCPFSQVFNATRFPSVYAWTRERISNCIADYSVLYNSTSFSTFRCYGVSPTKLNDLCFSNVYADSMVVRGDEVRQIAPSQTGVIADYNYKLPDDFTGCVIAWNSKAKDENGQYFYRLFRKSKLLPFQRDVSNVTYGSGKNDGCNPSEADCYWPLLKYGFTGSVSQDYQPYRVVVLSFELLNAPATVCGPGSGGSGNITNLCPFDEVFNATRFASVYAWNRKRISNCVADYSVLYNFAPFFAFKCYGVSPTKLNDLCFTNVYADSFVIRGNEVSQIAPGQTGNIADYNYKLPDDFTGCVIAWNSNKLDSKVGGNYNYRYRLFRKSNLKPFERDISTEIYQAGNKPCNGVAGVNCYFPLQSYGFRPTYGVGHQPYRVVVLSFELLHAPATVCGPGSGGSGSSQCVNLTTRTQLPPAYTNSFTRGVYYPDKVFRSSVLHSTQDLFLPFFSNVTWFHAIHVSGTNGTKRFDNPVLPFNDGVYFASTEKSNIIRGWIFGTTLDSKTQSLLIVNNATNVVIKVCEFQFCNDPFLGVYYHKNNKSWMESEFRVYSSANNCTFEYVSQPFLMDLEGKQGNFKNLREFVFKNIDGYFKIYSKHTPINLVRDLPQGFSALEPLVDLPIGINITRFQTLLALHRSYLTPGDSSSGWTAGAAAYYVGYLQPRTFLLKYNENGTITDAVDCALDPLSETKCTLKSFTVEKGIYQTSNFRVQPTESIVRFPNITNLCPFGEVFNATRFASVYAWNRKRISNCVADYSVLYNSASFSTFKCYGVSPTKLNDLCFTNVYADSFVIRGDEVRQIAPGQTGKIADYNYKLPDDFTGCVIAWNSNNLDSKVGGNYNYLYRLFRKSNLKPFERDISTEIYQAGSTPCNGVEGFNCYFPLQSYGFQPTNGVGYQPYRVVVLSFELLHAPATVCGPKKSTNLVKNKCVNFNFNGLTGTGVLTESNKKFLPFQQFGRDIADTTDAVRDPQTLEILDITPCSFGGVSVITPGTNTSNQVAVLYQDVNCTEVPVAIHADQLTPTWRVYSTGSNVFQTRAGCLIGAEHVNNSYECDIPIGAGICASYQTQTNSPGSASSVASQSIIAYTMSLGAENSVAYSNNSIAIPTNFTISVTTEILPVSMTKTSVDCTMYICGDSTECSNLLLQYGSFCTQLNRALTGIAVEQDKNTQEVFAQVKQIYKTPPIKDFGGFNFSQILPDPSKPSKRSFIEDLLFNKVTLADAGFIKQYGDCLGDIAARDLICAQKFNGLTVLPPLLTDEMIAQYTSALLAGTITSGWTFGAGAALQIPFAMQMAYRFNGIGVTQNVLYENQKLIANQFNSAIGKIQDSLSSTASALGKLQDVVNQNAQALNTLVKQLSSNFGAISSVLNDILSRLDPPEAEVQIDRLITGRLQSLQTYVTQQLIRAAEIRASANLAATKMSECVLGQSKRVDFCGKGYHLMSFPQSAPHGVVFLHVTYVPAQEKNFTTAPAICHDGKAHFPREGVFVSNGTHWFVTQRNFYEPQIITTDNTFVSGNCDVVIGIVNNTVYDPLQSELDSIKEELDKIHKNGSGGSGDIIKLLNEQVNKEMQSSNLYMSMSSWCYTHSLDGAGLFLFDHAAEEYEHAKKLIIFLNENNVPVQLTSISAPEHKFEGLTQIFQKAYEHEQHISESINNIVDHAIKSKDHATFNFLQWYVAEQHEEEVLFKDILDKIELIGNENHGLYLADQYVKGIAKSRKSGS

SEQ ID NO: 205 - protein, 1706 aa, synthetic construct
NITNRCPFDKVFNATRFPNVYAWERTKISDCVADYTVLYNSTSFSTFKCYGVSPSKLIDLCFTSVYADTFLIRSSEVRQVAPGETGVIADYNYKLPDDFTGCVIAWNTAKHDTGNYYYRSHRKTKLKPFERDLSSDDGNGVYTLSTYDFNPNVPVAYQATRVVVLSFELLNAPATVCGPGSGGSGNITNLCPFDEVFNATRFASVYAWNRKRISNCVADYSVLYNFAPFFAFKCYGVSPTKLNDLCFTNVYADSFVIRGNEVSQIAPGQTGNIADYNYKLPDDFTGCVIAWNSNKLDSKVGGNYNYRYRLFRKSNLKPFERDISTEIYQAGNKPCNGVAGVNCYFPLQSYGFRPTYGVGHQPYRVVVLSFELLHAPATVCGPGSGGSGSSQCVNLTTRTQLPPAYTNSFTRGVYYPDKVFRSSVLHSTQDLFLPFFSNVTWFHAIHVSGTNGTKRFDNPVLPFNDGVYFASTEKSNIIRGWIFGTTLDSKTQSLLIVNNATNVVIKVCEFQFCNDPFLGVYYHKNNKSWMESEFRVYSSANNCTFEYVSQPFLMDLEGKQGNFKNLREFVFKNIDGYFKIYSKHTPINLVRDLPQGFSALEPLVDLPIGINITRFQTLLALHRSYLTPGDSSSGWTAGAAAYYVGYLQPRTFLLKYNENGTITDAVDCALDPLSETKCTLKSFTVEKGIYQTSNFRVQPTESIVRFPNITNLCPFGEVFNATRFASVYAWNRKRISNCVADYSVLYNSASFSTFKCYGVSPTKLNDLCFTNVYADSFVIRGDEVRQIAPGQTGKIADYNYKLPDDFTGCVIAWNSNNLDSKVGGNYNYLYRLFRKSNLKPFERDISTEIYQAGSTPCNGVEGFNCYFPLQSYGFQPTNGVGYQPYRVVVLSFELLHAPATVCGPKKSTNLVKNKCVNFNFNGLTGTGVLTESNKKFLPFQQFGRDIADTTDAVRDPQTLEILDITPCSFGGVSVITPGTNTSNQVAVLYQDVNCTEVPVAIHADQLTPTWRVYSTGSNVFQTRAGCLIGAEHVNNSYECDIPIGAGICASYQTQTNSPGSASSVASQSIIAYTMSLGAENSVAYSNNSIAIPTNFTISVTTEILPVSMTKTSVDCTMYICGDSTECSNLLLQYGSFCTQLNRALTGIAVEQDKNTQEVFAQVKQIYKTPPIKDFGGFNFSQILPDPSKPSKRSFIEDLLFNKVTLADAGFIKQYGDCLGDIAARDLICAQKFNGLTVLPPLLTDEMIAQYTSALLAGTITSGWTFGAGAALQIPFAMQMAYRFNGIGVTQNVLYENQKLIANQFNSAIGKIQDSLSSTASALGKLQDVVNQNAQALNTLVKQLSSNFGAISSVLNDILSRLDPPEAEVQIDRLITGRLQSLQTYVTQQLIRAAEIRASANLAATKMSECVLGQSKRVDFCGKGYHLMSFPQSAPHGVVFLHVTYVPAQEKNFTTAPAICHDGKAHFPREGVFVSNGTHWFVTQRNFYEPQIITTDNTFVSGNCDVVIGIVNNTVYDPLQSELDSIKEELDKIHKNGSGGSGDIIKLLNEQVNKEMQSSNLYMSMSSWCYTHSLDGAGLFLFDHAAEEYEHAKKLIIFLNENNVPVQLTSISAPEHKFEGLTQIFQKAYEHEQHISESINNIVDHAIKSKDHATFNFLQWYVAEQHEEEVLFKDILDKIELIGNENHGLYLADQYVKGIAKSRKSGS

SEQ ID NO: 206 - protein, 1721 aa, synthetic construct
NVTQLCPFSDVFNRTMFPSVYAWERMSIRDCVADYAVLYNSSISFSTFECYGVSPTKLNDLCFSSVYADYFVVRGDDVKQIAPGKTGVIADYNYKLPDDFVGCVLAWNSRHVDNKQGFYYRLFRHGKIKPYQRDMSRELYSPSGTPCTVVGFNCYDPLAHYAFASPGIGIGYQPFRVVVLSFQLLNAPATVCGPGSGGSGNITNLCPFDEVFNATRFASVYAWNRKRISNCVADYSVLYNFAPFFAFKCYGVSPTKLNDLCFTNVYADSFVIRGNEVSQIAPGQTGNIADYNYKLPDDFTGCVIAWNSNKLDSKVGGNYNYRYRLFRKSNLKPFERDISTEIYQAGNKPCNGVAGVNCYFPLQSYGFRPTYGVGHQPYRVVVLSFELLHAPATVCGPGSGGSGSSQCVNLTTRTQLPPAYTNSFTRGVYYPDKVFRSSVLHSTQDLFLPFFSNVTWFHAIHVSGTNGTKRFDNPVLPFNDGVYFASTEKSNIIRGWIFGTTLDSKTQSLLIVNNATNVVIKVCEFQFCNDPFLGVYYHKNNKSWMESEFRVYSSANNCTFEYVSQPFLMDLEGKQGNFKNLREFVFKNIDGYFKIYSKHTPINLVRDLPQGFSALEPLVDLPIGINITRFQTLLALHRSYLTPGDSSSGWTAGAAAYYVGYLQPRTFLLKYNENGTITDAVDCALDPLSETKCTLKSFTVEKGIYQTSNFRVQPTESIVRFPNITNLCPFGEVFNATRFASVYAWNRKRISNCVADYSVLYNSASFSTFKCYGVSPTKLNDLCFTNVYADSFVIRGDEVRQIAPGQTGKIADYNYKLPDDFTGCVIAWNSNNLDSKVGGNYNYLYRLFRKSNLKPFERDISTEIYQAGSTPCNGVEGFNCYFPLQSYGFQPTNGVGYQPYRVVVLSFELLHAPATVCGPKKSTNLVKNKCVNFNFNGLTGTGVLTESNKKFLPFQQFGRDIADTTDAVRDPQTLEILDITPCSFGGVSVITPGTNTSNQVAVLYQDVNCTEVPVAIHADQLTPTWRVYSTGSNVFQTRAGCLIGAEHVNNSYECDIPIGAGICASYQTQTNSPGSASSVASQSIIAYTMSLGAENSVAYSNNSIAIPTNFTISVTTEILPVSMTKTSVDCTMYICGDSTECSNLLLQYGSFCTQLNRALTGIAVEQDKNTQEVFAQVKQIYKTPPIKDFGGFNFSQILPDPSKPSKRSFIEDLLFNKVTLADAGFIKQYGDCLGDIAARDLICAQKFNGLTVLPPLLTDEMIAQYTSALLAGTITSGWTFGAGAALQIPFAMQMAYRFNGIGVTQNVLYENQKLIANQFNSAIGKIQDSLSSTASALGKLQDVVNQNAQALNTLVKQLSSNFGAISSVLNDILSRLDPPEAEVQIDRLITGRLQSLQTYVTQQLIRAAEIRASANLAATKMSECVLGQSKRVDFCGKGYHLMSFPQSAPHGVVFLHVTYVPAQEKNFTTAPAICHDGKAHFPREGVFVSNGTHWFVTQRNFYEPQIITTDNTFVSGNCDVVIGIVNNTVYDPLQSELDSIKEELDKIHKNGSGGSGDIIKLLNEQVNKEMQSSNLYMSMSSWCYTHSLDGAGLFLFDHAAEEYEHAKKLIIFLNENNVPVQLTSISAPEHKFEGLTQIFQKAYEHEQHISESINNIVDHAIKSKDHATFNFLQWYVAEQHEEEVLFKDILDKIELIGNENHGLYLADQYVKGIAKSRKSGS

SEQ ID NO: 207 - protein, 1723 aa, synthetic construct
NITNLCPFDEVFNATRFPSVYAWERKKISNCVADYSVLYNSTSFSTFKCYGVSPSKLNDLCFTSVYADSFVIRGDEVRQIAPGQTGVIADYNYKLPDDFTGCVIAWNTANQDSGEGGNPNYYYRSSRKSKLKPFERDLSSDEYNVGSQPCNRMGPNCYRTLSTYDFYPTVGVGYQPYRVVVLSFELLNAPATVCGPGSGGSGNITNLCPFDEVFNATRFASVYAWNRKRISNCVADYSVLYNFAPFFAFKCYGVSPTKLNDLCFTNVYADSFVIRGNEVSQIAPGQTGNIADYNYKLPDDFTGCVIAWNSNKLDSKVGGNYNYRYRLFRKSNLKPFERDISTEIYQAGNKPCNGVAGVNCYFPLQSYGFRPTYGVGHQPYRVVVLSFELLHAPATVCGPGSGGSGSSQCVNLTTRTQLPPAYTNSFTRGVYYPDKVFRSSVLHSTQDLFLPFFSNVTWFHAIHVSGTNGTKRFDNPVLPFNDGVYFASTEKSNIIRGWIFGTTLDSKTQSLLIVNNATNVVIKVCEFQFCNDPFLGVYYHKNNKSWMESEFRVYSSANNCTFEYVSQPFLMDLEGKQGNFKNLREFVFKNIDGYFKIYSKHTPINLVRDLPQGFSALEPLVDLPIGINITRFQTLLALHRSYLTPGDSSSGWTAGAAAYYVGYLQPRTFLLKYNENGTITDAVDCALDPLSETKCTLKSFTVEKGIYQTSNFRVQPTESIVRFPNITNLCPFGEVFNATRFASVYAWNRKRISNCVADYSVLYNSASFSTFKCYGVSPTKLNDLCFTNVYADSFVIRGDEVRQIAPGQTGKIADYNYKLPDDFTGCVIAWNSNNLDSKVGGNYNYLYRLFRKSNLKPFERDISTEIYQAGSTPCNGVEGFNCYFPLQSYGFQPTNGVGYQPYRVVVLSFELLHAPATVCGPKKSTNLVKNKCVNFNFNGLTGTGVLTESNKKFLPFQQFGRDIADTTDAVRDPQTLEILDITPCSFGGVSVITPGTNTSNQVAVLYQDVNCTEVPVAIHADQLTPTWRVYSTGSNVFQTRAGCLIGAEHVNNSYECDIPIGAGICASYQTQTNSPGSASSVASQSIIAYTMSLGAENSVAYSNNSIAIPTNFTISVTTEILPVSMTKTSVDCTMYICGDSTECSNLLLQYGSFCTQLNRALTGIAVEQDKNTQEVFAQVKQIYKTPPIKDFGGFNFSQILPDPSKPSKRSFIEDLLFNKVTLADAGFIKQYGDCLGDIAARDLICAQKFNGLTVLPPLLTDEMIAQYTSALLAGTITSGWTFGAGAALQIPFAMQMAYRFNGIGVTQNVLYENQKLIANQFNSAIGKIQDSLSSTASALGKLQDVVNQNAQALNTLVKQLSSNFGAISSVLNDILSRLDPPEAEVQIDRLITGRLQSLQTYVTQQLIRAAEIRASANLAATKMSECVLGQSKRVDFCGKGYHLMSFPQSAPHGVVFLHVTYVPAQEKNFTTAPAICHDGKAHFPREGVFVSNGTHWFVTQRNFYEPQIITTDNTFVSGNCDVVIGIVNNTVYDPLQSELDSIKEELDKIHKNGSGGSGDIIKLLNEQVNKEMQSSNLYMSMSSWCYTHSLDGAGLFLFDHAAEEYEHAKKLIIFLNENNVPVQLTSISAPEHKFEGLTQIFQKAYEHEQHISESINNIVDHAIKSKDHATFNFLQWYVAEQHEEEVLFKDILDKIELIGNENHGLYLADQYVKGIAKSRKSGS

SEQ ID NO: 208 - protein, 1810 aa, synthetic construct
NLPDCNIEEWLTAKSVPSPLNWERKTFSNCNFNLSSLLRFVQADSFSCNNIDASKVYGMCFGSISVDKFAIPNSRQVDLQLGNSGFLQSFNYKIDTTATSCQLYYSLPANNVTINNYNPSSWNRRYGFNDDTVFKPRPAGVLTNHDVVYSQQCFKVPNTFCPCKNNGSCVSSGKGTTNGSGTCPAGTNYRTCENTTWCACSCTPDPITASGPRKCPQKKSLVGVGEHCSGLGVDSDYCGNVSCLCSTDAFLGWSADSCLVNDRCNIFANIILNGINSGTTCSTGSGGSGNITNLCPFDEVFNATRFASVYAWNRKRISNCVADYSVLYNFAPFFAFKCYGVSPTKLNDLCFTNVYADSFVIRGNEVSQIAPGQTGNIADYNYKLPDDFTGCVIAWNSNKLDSKVGGNYNYRYRLFRKSNLKPFERDISTEIYQAGNKPCNGVAGVNCYFPLQSYGFRPTYGVGHQPYRVVVLSFELLHAPATVCGPGSGGSGSSQCVNLTTRTQLPPAYTNSFTRGVYYPDKVFRSSVLHSTQDLFLPFFSNVTWFHAIHVSGTNGTKRFDNPVLPFNDGVYFASTEKSNIIRGWIFGTTLDSKTQSLLIVNNATNVVIKVCEFQFCNDPFLGVYYHKNNKSWMESEFRVYSSANNCTFEYVSQPFLMDLEGKQGNFKNLREFVFKNIDGYFKIYSKHTPINLVRDLPQGFSALEPLVDLPIGINITRFQTLLALHRSYLTPGDSSSGWTAGAAAYYVGYLQPRTFLLKYNENGTITDAVDCALDPLSETKCTLKSFTVEKGIYQTSNFRVQPTESIVRFPNITNLCPFGEVFNATRFASVYAWNRKRISNCVADYSVLYNSASFSTFKCYGVSPTKLNDLCFTNVYADSFVIRGDEVRQIAPGQTGKIADYNYKLPDDFTGCVIAWNSNNLDSKVGGNYNYLYRLFRKSNLKPFERDISTEIYQAGSTPCNGVEGFNCYFPLQSYGFQPTNGVGYQPYRVVVLSFELLHAPATVCGPKKSTNLVKNKCVNFNFNGLTGTGVLTESNKKFLPFQQFGRDIADTTDAVRDPQTLEILDITPCSFGGVSVITPGTNTSNQVAVLYQDVNCTEVPVAIHADQLTPTWRVYSTGSNVFQTRAGCLIGAEHVNNSYECDIPIGAGICASYQTQTNSPGSASSVASQSIIAYTMSLGAENSVAYSNNSIAIPTNFTISVTTEILPVSMTKTSVDCTMYICGDSTECSNLLLQYGSFCTQLNRALTGIAVEQDKNTQEVFAQVKQIYKTPPIKDFGGFNFSQILPDPSKPSKRSFIEDLLFNKVTLADAGFIKQYGDCLGDIAARDLICAQKFNGLTVLPPLLTDEMIAQYTSALLAGTITSGWTFGAGAALQIPFAMQMAYRFNGIGVTQNVLYENQKLIANQFNSAIGKIQDSLSSTASALGKLQDVVNQNAQALNTLVKQLSSNFGAISSVLNDILSRLDPPEAEVQIDRLITGRLQSLQTYVTQQLIRAAEIRASANLAATKMSECVLGQSKRVDFCGKGYHLMSFPQSAPHGVVFLHVTYVPAQEKNFTTAPAICHDGKAHFPREGVFVSNGTHWFVTQRNFYEPQIITTDNTFVSGNCDVVIGIVNNTVYDPLQSELDSIKEELDKIHKNGSGGSGDIIKLLNEQVNKEMQSSNLYMSMSSWCYTHSLDGAGLFLFDHAAEEYEHAKKLIIFLNENNVPVQLTSISAPEHKFEGLTQIFQKAYEHEQHISESINNIVDHAIKSKDHATFNFLQWYVAEQHEEEVLFKDILDKIELIGNENHGLYLADQYVKGIAKSRKSGS

SEQ ID NO: 209 - protein, 1736 aa, synthetic construct
QGVECDFSKLFKAAAPQIYNFSRLVFTNCNYNLTKLLSLFQVDEFSCHQISPSALASGCYSSLTVDYFAYPLSMKSYLQIGSAGEISQFNYKQDFSNPTCRILASVPANVSITKPDKYIYISQCYSLSAYSDVDVPHYVNPGQYTSIPCLYLTSSGFDEDGQYFRYNLTQFEGQNYLVATGVTVSMTDNLQMVFVITVQYGTDTNSVCPGSGGSGNITNLCPFDEVFNATRFASVYAWNRKRISNCVADYSVLYNFAPFFAFKCYGVSPTKLNDLCFTNVYADSFVIRGNEVSQIAPGQTGNIADYNYKLPDDFTGCVIAWNSNKLDSKVGGNYNYRYRLFRKSNLKPFERDISTEIYQAGNKPCNGVAGVNCYFPLQSYGFRPTYGVGHQPYRVVVLSFELLHAPATVCGPGSGGSGSSQCVNLTTRTQLPPAYTNSFTRGVYYPDKVFRSSVLHSTQDLFLPFFSNVTWFHAIHVSGTNGTKRFDNPVLPFNDGVYFASTEKSNIIRGWIFGTTLDSKTQSLLIVNNATNVVIKVCEFQFCNDPFLGVYYHKNNKSWMESEFRVYSSANNCTFEYVSQPFLMDLEGKQGNFKNLREFVFKNIDGYFKIYSKHTPINLVRDLPQGFSALEPLVDLPIGINITRFQTLLALHRSYLTPGDSSSGWTAGAAAYYVGYLQPRTFLLKYNENGTITDAVDCALDPLSETKCTLKSFTVEKGIYQTSNFRVQPTESIVRFPNITNLCPFGEVFNATRFASVYAWNRKRISNCVADYSVLYNSASFSTFKCYGVSPTKLNDLCFTNVYADSFVIRGDEVRQIAPGQTGKIADYNYKLPDDFTGCVIAWNSNNLDSKVGGNYNYLYRLFRKSNLKPFERDISTEIYQAGSTPCNGVEGFNCYFPLQSYGFQPTNGVGYQPYRVVVLSFELLHAPATVCGPKKSTNLVKNKCVNFNFNGLTGTGVLTESNKKFLPFQQFGRDIADTTDAVRDPQTLEILDITPCSFGGVSVITPGTNTSNQVAVLYQDVNCTEVPVAIHADQLTPTWRVYSTGSNVFQTRAGCLIGAEHVNNSYECDIPIGAGICASYQTQTNSPGSASSVASQSIIAYTMSLGAENSVAYSNNSIAIPTNFTISVTTEILPVSMTKTSVDCTMYICGDSTECSNLLLQYGSFCTQLNRALTGIAVEQDKNTQEVFAQVKQIYKTPPIKDFGGFNFSQILPDPSKPSKRSFIEDLLFNKVTLADAGFIKQYGDCLGDIAARDLICAQKFNGLTVLPPLLTDEMIAQYTSALLAGTITSGWTFGAGAALQIPFAMQMAYRFNGIGVTQNVLYENQKLIANQFNSAIGKIQDSLSSTASALGKLQDVVNQNAQALNTLVKQLSSNFGAISSVLNDILSRLDPPEAEVQIDRLITGRLQSLQTYVTQQLIRAAEIRASANLAATKMSECVLGQSKRVDFCGKGYHLMSFPQSAPHGVVFLHVTYVPAQEKNFTTAPAICHDGKAHFPREGVFVSNGTHWFVTQRNFYEPQIITTDNTFVSGNCDVVIGIVNNTVYDPLQSELDSIKEELDKIHKNGSGGSGDIIKLLNEQVNKEMQSSNLYMSMSSWCYTHSLDGAGLFLFDHAAEEYEHAKKLIIFLNENNVPVQLTSISAPEHKFEGLTQIFQKAYEHEQHISESINNIVDHAIKSKDHATFNFLQWYVAEQHEEEVLFKDILDKIELIGNENHGLYLADQYVKGIAKSRKSGS

SEQ ID NO: 210 - protein, 1735 aa, synthetic construct
ELTECDLDVLFKNDAPIIANYSRRVFTNCNYNLTKLLSLVQVDEFVCHKTTPEALATGCYSSLTVDWFALPFSMKSTLAIGSAEAISMFNYNQDYSNPTCRIHAAVTANVSTALNFTANANYAYISRCQGVDGKPILLQPGQMTNIACRSGVLARPSDADYFGYSFQGRNYYLGRKSYKPKTDEGDVQMVYVITPKYDKGPDTVCPLKGSGGSGNITNLCPFDEVFNATRFASVYAWNRKRISNCVADYSVLYNFAPFFAFKCYGVSPTKLNDLCFTNVYADSFVIRGNEVSQIAPGQTGNIADYNYKLPDDFTGCVIAWNSNKLDSKVGGNYNYRYRLFRKSNLKPFERDISTEIYQAGNKPCNGVAGVNCYFPLQSYGFRPTYGVGHQPYRVVVLSFELLHAPATVCGPGSGGSGSSQCVNLTTRTQLPPAYTNSFTRGVYYPDKVFRSSVLHSTQDLFLPFFSNVTWFHAIHVSGTNGTKRFDNPVLPFNDGVYFASTEKSNIIRGWIFGTTLDSKTQSLLIVNNATNVVIKVCEFQFCNDPFLGVYYHKNNKSWMESEFRVYSSANNCTFEYVSQPFLMDLEGKQGNFKNLREFVFKNIDGYFKIYSKHTPINLVRDLPQGFSALEPLVDLPIGINITRFQTLLALHRSYLTPGDSSSGWTAGAAAYYVGYLQPRTFLLKYNENGTITDAVDCALDPLSETKCTLKSFTVEKGIYQTSNFRVQPTESIVRFPNITNLCPFGEVFNATRFASVYAWNRKRISNCVADYSVLYNSASFSTFKCYGVSPTKLNDLCFTNVYADSFVIRGDEVRQIAPGQTGKIADYNYKLPDDFTGCVIAWNSNNLDSKVGGNYNYLYRLFRKSNLKPFERDISTEIYQAGSTPCNGVEGFNCYFPLQSYGFQPTNGVGYQPYRVVVLSFELLHAPATVCGPKKSTNLVKNKCVNFNFNGLTGTGVLTESNKKFLPFQQFGRDIADTTDAVRDPQTLEILDITPCSFGGVSVITPGTNTSNQVAVLYQDVNCTEVPVAIHADQLTPTWRVYSTGSNVFQTRAGCLIGAEHVNNSYECDIPIGAGICASYQTQTNSPGSASSVASQSIIAYTMSLGAENSVAYSNNSIAIPTNFTISVTTEILPVSMTKTSVDCTMYICGDSTECSNLLLQYGSFCTQLNRALTGIAVEQDKNTQEVFAQVKQIYKTPPIKDFGGFNFSQILPDPSKPSKRSFIEDLLFNKVTLADAGFIKQYGDCLGDIAARDLICAQKFNGLTVLPPLLTDEMIAQYTSALLAGTITSGWTFGAGAALQIPFAMQMAYRFNGIGVTQNVLYENQKLIANQFNSAIGKIQDSLSSTASALGKLQDVVNQNAQALNTLVKQLSSNFGAISSVLNDILSRLDPPEAEVQIDRLITGRLQSLQTYVTQQLIRAAEIRASANLAATKMSECVLGQSKRVDFCGKGYHLMSFPQSAPHGVVFLHVTYVPAQEKNFTTAPAICHDGKAHFPREGVFVSNGTHWFVTQRNFYEPQIITTDNTFVSGNCDVVIGIVNNTVYDPLQSELDSIKEELDKIHKNGSGGSGDIIKLLNEQVNKEMQSSNLYMSMSSWCYTHSLDGAGLFLFDHAAEEYEHAKKLIIFLNENNVPVQLTSISAPEHKFEGLTQIFQKAYEHEQHISESINNIVDHAIKSKDHATFNFLQWYVAEQHEEEVLFKDILDKIELIGNENHGLYLADQYVKGIAKSRKSGS

SEQ ID NO: 211 - protein, 1731 aa, synthetic construct
VYPDCNFTELFRERAPTIMQYKREVFTRCNYNLSLLLSLVQVDEFVCDKITPEALATGCYSSLTVDWFAFPYAWKSYLAIGSADRIVRFNYNQDYSNPSCRIHSKVNSSIGISYAGAYSYITNCNYGATNKDDVVKPGGRASQQCITGALNSPTTGQLWAYNFGGVPYRVSRLTYTDHLSDPLDMVYVITVKYEPGAETVCPKQGSGGSGNITNLCPFDEVFNATRFASVYAWNRKRISNCVADYSVLYNFAPFFAFKCYGVSPTKLNDLCFTNVYADSFVIRGNEVSQIAPGQTGNIADYNYKLPDDFTGCVIAWNSNKLDSKVGGNYNYRYRLFRKSNLKPFERDISTEIYQAGNKPCNGVAGVNCYFPLQSYGFRPTYGVGHQPYRVVVLSFELLHAPATVCGPGSGGSGSSQCVNLTTRTQLPPAYTNSFTRGVYYPDKVFRSSVLHSTQDLFLPFFSNVTWFHAIHVSGTNGTKRFDNPVLPFNDGVYFASTEKSNIIRGWIFGTTLDSKTQSLLIVNNATNVVIKVCEFQFCNDPFLGVYYHKNNKSWMESEFRVYSSANNCTFEYVSQPFLMDLEGKQGNFKNLREFVFKNIDGYFKIYSKHTPINLVRDLPQGFSALEPLVDLPIGINITRFQTLLALHRSYLTPGDSSSGWTAGAAAYYVGYLQPRTFLLKYNENGTITDAVDCALDPLSETKCTLKSFTVEKGIYQTSNFRVQPTESIVRFPNITNLCPFGEVFNATRFASVYAWNRKRISNCVADYSVLYNSASFSTFKCYGVSPTKLNDLCFTNVYADSFVIRGDEVRQIAPGQTGKIADYNYKLPDDFTGCVIAWNSNNLDSKVGGNYNYLYRLFRKSNLKPFERDISTEIYQAGSTPCNGVEGFNCYFPLQSYGFQPTNGVGYQPYRVVVLSFELLHAPATVCGPKKSTNLVKNKCVNFNFNGLTGTGVLTESNKKFLPFQQFGRDIADTTDAVRDPQTLEILDITPCSFGGVSVITPGTNTSNQVAVLYQDVNCTEVPVAIHADQLTPTWRVYSTGSNVFQTRAGCLIGAEHVNNSYECDIPIGAGICASYQTQTNSPGSASSVASQSIIAYTMSLGAENSVAYSNNSIAIPTNFTISVTTEILPVSMTKTSVDCTMYICGDSTECSNLLLQYGSFCTQLNRALTGIAVEQDKNTQEVFAQVKQIYKTPPIKDFGGFNFSQILPDPSKPSKRSFIEDLLFNKVTLADAGFIKQYGDCLGDIAARDLICAQKFNGLTVLPPLLTDEMIAQYTSALLAGTITSGWTFGAGAALQIPFAMQMAYRFNGIGVTQNVLYENQKLIANQFNSAIGKIQDSLSSTASALGKLQDVVNQNAQALNTLVKQLSSNFGAISSVLNDILSRLDPPEAEVQIDRLITGRLQSLQTYVTQQLIRAAEIRASANLAATKMSECVLGQSKRVDFCGKGYHLMSFPQSAPHGVVFLHVTYVPAQEKNFTTAPAICHDGKAHFPREGVFVSNGTHWFVTQRNFYEPQIITTDNTFVSGNCDVVIGIVNNTVYDPLQSELDSIKEELDKIHKNGSGGSGDIIKLLNEQVNKEMQSSNLYMSMSSWCYTHSLDGAGLFLFDHAAEEYEHAKKLIIFLNENNVPVQLTSISAPEHKFEGLTQIFQKAYEHEQHISESINNIVDHAIKSKDHATFNFLQWYVAEQHEEEVLFKDILDKIELIGNENHGLYLADQYVKGIAKSRKSGS

SEQ ID NO: 212 - protein, 1737 aa, synthetic construct
QATECDFSPMLTGVAPQVYNFKRLVFSNCNYNLTKLLSLFAVDEFSCNGISPDAIARGCYSTLTVDYFAYPLSMKSYIRPGSAGNIPLYNYKQSFANPTCRVMASVPANVTITKPDAYGYISKCSRLTGANQDVETPLYINPGEYSICRDFSPGGFSEDGQVFKRTLTQFEGGGLLIGVGTRVPMTDNLQMSFIIFVQYGTGTDSVCPMLGSGGSGNITNLCPFDEVFNATRFASVYAWNRKRISNCVADYSVLYNFAPFFAFKCYGVSPTKLNDLCFTNVYADSFVIRGNEVSQIAPGQTGNIADYNYKLPDDFTGCVIAWNSNKLDSKVGGNYNYRYRLFRKSNLKPFERDISTEIYQAGNKPCNGVAGVNCYFPLQSYGFRPTYGVGHQPYRVVVLSFELLHAPATVCGPGSGGSGSSQCVNLTTRTQLPPAYTNSFTRGVYYPDKVFRSSVLHSTQDLFLPFFSNVTWFHAIHVSGTNGTKRFDNPVLPFNDGVYFASTEKSNIIRGWIFGTTLDSKTQSLLIVNNATNVVIKVCEFQFCNDPFLGVYYHKNNKSWMESEFRVYSSANNCTFEYVSQPFLMDLEGKQGNFKNLREFVFKNIDGYFKIYSKHTPINLVRDLPQGFSALEPLVDLPIGINITRFQTLLALHRSYLTPGDSSSGWTAGAAAYYVGYLQPRTFLLKYNENGTITDAVDCALDPLSETKCTLKSFTVEKGIYQTSNFRVQPTESIVRFPNITNLCPFGEVFNATRFASVYAWNRKRISNCVADYSVLYNSASFSTFKCYGVSPTKLNDLCFTNVYADSFVIRGDEVRQIAPGQTGKIADYNYKLPDDFTGCVIAWNSNNLDSKVGGNYNYLYRLFRKSNLKPFERDISTEIYQAGSTPCNGVEGFNCYFPLQSYGFQPTNGVGYQPYRVVVLSFELLHAPATVCGPKKSTNLVKNKCVNFNFNGLTGTGVLTESNKKFLPFQQFGRDIADTTDAVRDPQTLEILDITPCSFGGVSVITPGTNTSNQVAVLYQDVNCTEVPVAIHADQLTPTWRVYSTGSNVFQTRAGCLIGAEHVNNSYECDIPIGAGICASYQTQTNSPGSASSVASQSIIAYTMSLGAENSVAYSNNSIAIPTNFTISVTTEILPVSMTKTSVDCTMYICGDSTECSNLLLQYGSFCTQLNRALTGIAVEQDKNTQEVFAQVKQIYKTPPIKDFGGFNFSQILPDPSKPSKRSFIEDLLFNKVTLADAGFIKQYGDCLGDIAARDLICAQKFNGLTVLPPLLTDEMIAQYTSALLAGTITSGWTFGAGAALQIPFAMQMAYRFNGIGVTQNVLYENQKLIANQFNSAIGKIQDSLSSTASALGKLQDVVNQNAQALNTLVKQLSSNFGAISSVLNDILSRLDPPEAEVQIDRLITGRLQSLQTYVTQQLIRAAEIRASANLAATKMSECVLGQSKRVDFCGKGYHLMSFPQSAPHGVVFLHVTYVPAQEKNFTTAPAICHDGKAHFPREGVFVSNGTHWFVTQRNFYEPQIITTDNTFVSGNCDVVIGIVNNTVYDPLQSELDSIKEELDKIHKNGSGGSGDIIKLLNEQVNKEMQSSNLYMSMSSWCYTHSLDGAGLFLFDHAAEEYEHAKKLIIFLNENNVPVQLTSISAPEHKFEGLTQIFQKAYEHEQHISESINNIVDHAIKSKDHATFNFLQWYVAEQHEEEVLFKDILDKIELIGNENHGLYLADQYVKGIAKSRKSGS

SEQ ID NO: 213 - protein, 1728 aa, synthetic construct
QGVECDFSKLFKAAPPQIYNFSRLVFTNCNYNLTKLLSLFHVSEFSCHQVSPSALASGCYSSLTVDYFAYPLYLASYLQQGSTGEIAQYNYKQDFSNPTCRILASVPANVSIPKPDKYIWLSQCYSFSAYSGDIPHYVQPGQYTPCLYLTSSGFDKSYQTNRDMQNKMAATGVTSSMTDNLQMAFVISVQYGTDTNSVCPMGSGGSGNITNLCPFDEVFNATRFASVYAWNRKRISNCVADYSVLYNFAPFFAFKCYGVSPTKLNDLCFTNVYADSFVIRGNEVSQIAPGQTGNIADYNYKLPDDFTGCVIAWNSNKLDSKVGGNYNYRYRLFRKSNLKPFERDISTEIYQAGNKPCNGVAGVNCYFPLQSYGFRPTYGVGHQPYRVVVLSFELLHAPATVCGPGSGGSGSSQCVNLTTRTQLPPAYTNSFTRGVYYPDKVFRSSVLHSTQDLFLPFFSNVTWFHAIHVSGTNGTKRFDNPVLPFNDGVYFASTEKSNIIRGWIFGTTLDSKTQSLLIVNNATNVVIKVCEFQFCNDPFLGVYYHKNNKSWMESEFRVYSSANNCTFEYVSQPFLMDLEGKQGNFKNLREFVFKNIDGYFKIYSKHTPINLVRDLPQGFSALEPLVDLPIGINITRFQTLLALHRSYLTPGDSSSGWTAGAAAYYVGYLQPRTFLLKYNENGTITDAVDCALDPLSETKCTLKSFTVEKGIYQTSNFRVQPTESIVRFPNITNLCPFGEVFNATRFASVYAWNRKRISNCVADYSVLYNSASFSTFKCYGVSPTKLNDLCFTNVYADSFVIRGDEVRQIAPGQTGKIADYNYKLPDDFTGCVIAWNSNNLDSKVGGNYNYLYRLFRKSNLKPFERDISTEIYQAGSTPCNGVEGFNCYFPLQSYGFQPTNGVGYQPYRVVVLSFELLHAPATVCGPKKSTNLVKNKCVNFNFNGLTGTGVLTESNKKFLPFQQFGRDIADTTDAVRDPQTLEILDITPCSFGGVSVITPGTNTSNQVAVLYQDVNCTEVPVAIHADQLTPTWRVYSTGSNVFQTRAGCLIGAEHVNNSYECDIPIGAGICASYQTQTNSPGSASSVASQSIIAYTMSLGAENSVAYSNNSIAIPTNFTISVTTEILPVSMTKTSVDCTMYICGDSTECSNLLLQYGSFCTQLNRALTGIAVEQDKNTQEVFAQVKQIYKTPPIKDFGGFNFSQILPDPSKPSKRSFIEDLLFNKVTLADAGFIKQYGDCLGDIAARDLICAQKFNGLTVLPPLLTDEMIAQYTSALLAGTITSGWTFGAGAALQIPFAMQMAYRFNGIGVTQNVLYENQKLIANQFNSAIGKIQDSLSSTASALGKLQDVVNQNAQALNTLVKQLSSNFGAISSVLNDILSRLDPPEAEVQIDRLITGRLQSLQTYVTQQLIRAAEIRASANLAATKMSECVLGQSKRVDFCGKGYHLMSFPQSAPHGVVFLHVTYVPAQEKNFTTAPAICHDGKAHFPREGVFVSNGTHWFVTQRNFYEPQIITTDNTFVSGNCDVVIGIVNNTVYDPLQSELDSIKEELDKIHKNGSGGSGDIIKLLNEQVNKEMQSSNLYMSMSSWCYTHSLDGAGLFLFDHAAEEYEHAKKLIIFLNENNVPVQLTSISAPEHKFEGLTQIFQKAYEHEQHISESINNIVDHAIKSKDHATFNFLQWYVAEQHEEEVLFKDILDKIELIGNENHGLYLADQYVKGIAKSRKSGS

SEQ ID NO: 214 - protein, 1728 aa, synthetic construct
QGVECDFSKLFKAAPPQIYNFSRLVFTNCNYNLTKLLSLFHVSEFSCHQVSPSALASGCYSSLTVDYFAYPLYLASYLQQGSTGEIAQYNYKQDFSNPTCRILASVPANVSIPKPDKYIWLSQCYSFSAYSGDVPHYVLPGQYTPCLYLTSSGFDNSYQTNRDFQNKMAATGVISSMTDNLQMAFVISVQYGTDTNSVCPMGSGGSGNITNLCPFDEVFNATRFASVYAWNRKRISNCVADYSVLYNFAPFFAFKCYGVSPTKLNDLCFTNVYADSFVIRGNEVSQIAPGQTGNIADYNYKLPDDFTGCVIAWNSNKLDSKVGGNYNYRYRLFRKSNLKPFERDISTEIYQAGNKPCNGVAGVNCYFPLQSYGFRPTYGVGHQPYRVVVLSFELLHAPATVCGPGSGGSGSSQCVNLTTRTQLPPAYTNSFTRGVYYPDKVFRSSVLHSTQDLFLPFFSNVTWFHAIHVSGTNGTKRFDNPVLPFNDGVYFASTEKSNIIRGWIFGTTLDSKTQSLLIVNNATNVVIKVCEFQFCNDPFLGVYYHKNNKSWMESEFRVYSSANNCTFEYVSQPFLMDLEGKQGNFKNLREFVFKNIDGYFKIYSKHTPINLVRDLPQGFSALEPLVDLPIGINITRFQTLLALHRSYLTPGDSSSGWTAGAAAYYVGYLQPRTFLLKYNENGTITDAVDCALDPLSETKCTLKSFTVEKGIYQTSNFRVQPTESIVRFPNITNLCPFGEVFNATRFASVYAWNRKRISNCVADYSVLYNSASFSTFKCYGVSPTKLNDLCFTNVYADSFVIRGDEVRQIAPGQTGKIADYNYKLPDDFTGCVIAWNSNNLDSKVGGNYNYLYRLFRKSNLKPFERDISTEIYQAGSTPCNGVEGFNCYFPLQSYGFQPTNGVGYQPYRVVVLSFELLHAPATVCGPKKSTNLVKNKCVNFNFNGLTGTGVLTESNKKFLPFQQFGRDIADTTDAVRDPQTLEILDITPCSFGGVSVITPGTNTSNQVAVLYQDVNCTEVPVAIHADQLTPTWRVYSTGSNVFQTRAGCLIGAEHVNNSYECDIPIGAGICASYQTQTNSPGSASSVASQSIIAYTMSLGAENSVAYSNNSIAIPTNFTISVTTEILPVSMTKTSVDCTMYICGDSTECSNLLLQYGSFCTQLNRALTGIAVEQDKNTQEVFAQVKQIYKTPPIKDFGGFNFSQILPDPSKPSKRSFIEDLLFNKVTLADAGFIKQYGDCLGDIAARDLICAQKFNGLTVLPPLLTDEMIAQYTSALLAGTITSGWTFGAGAALQIPFAMQMAYRFNGIGVTQNVLYENQKLIANQFNSAIGKIQDSLSSTASALGKLQDVVNQNAQALNTLVKQLSSNFGAISSVLNDILSRLDPPEAEVQIDRLITGRLQSLQTYVTQQLIRAAEIRASANLAATKMSECVLGQSKRVDFCGKGYHLMSFPQSAPHGVVFLHVTYVPAQEKNFTTAPAICHDGKAHFPREGVFVSNGTHWFVTQRNFYEPQIITTDNTFVSGNCDVVIGIVNNTVYDPLQSELDSIKEELDKIHKNGSGGSGDIIKLLNEQVNKEMQSSNLYMSMSSWCYTHSLDGAGLFLFDHAAEEYEHAKKLIIFLNENNVPVQLTSISAPEHKFEGLTQIFQKAYEHEQHISESINNIVDHAIKSKDHATFNFLQWYVAEQHEEEVLFKDILDKIELIGNENHGLYLADQYVKGIAKSRKSGS

SEQ ID NO: 215 - protein, 1726 aa, synthetic construct
TTQECDFTPMLTGTPPPIYNFKRLVFTNCNYNLTKLLSLFQVSEFSCHQVSPSSLATGCYSSLTVDYFAYSTDMSSYLQPGSAGAIVQFNYKQDFSNPTCRVLATVPQNLTTITKPSNYAYLTECYKTSAYGKNYLYNAPGAYTPCLSLASRGFSTKYQSHSDGELTTTGYIYPVTGNLQMAFIISVQYGTDTNSVCPMGSGGSGNITNLCPFDEVFNATRFASVYAWNRKRISNCVADYSVLYNFAPFFAFKCYGVSPTKLNDLCFTNVYADSFVIRGNEVSQIAPGQTGNIADYNYKLPDDFTGCVIAWNSNKLDSKVGGNYNYRYRLFRKSNLKPFERDISTEIYQAGNKPCNGVAGVNCYFPLQSYGFRPTYGVGHQPYRVVVLSFELLHAPATVCGPGSGGSGSSQCVNLTTRTQLPPAYTNSFTRGVYYPDKVFRSSVLHSTQDLFLPFFSNVTWFHAIHVSGTNGTKRFDNPVLPFNDGVYFASTEKSNIIRGWIFGTTLDSKTQSLLIVNNATNVVIKVCEFQFCNDPFLGVYYHKNNKSWMESEFRVYSSANNCTFEYVSQPFLMDLEGKQGNFKNLREFVFKNIDGYFKIYSKHTPINLVRDLPQGFSALEPLVDLPIGINITRFQTLLALHRSYLTPGDSSSGWTAGAAAYYVGYLQPRTFLLKYNENGTITDAVDCALDPLSETKCTLKSFTVEKGIYQTSNFRVQPTESIVRFPNITNLCPFGEVFNATRFASVYAWNRKRISNCVADYSVLYNSASFSTFKCYGVSPTKLNDLCFTNVYADSFVIRGDEVRQIAPGQTGKIADYNYKLPDDFTGCVIAWNSNNLDSKVGGNYNYLYRLFRKSNLKPFERDISTEIYQAGSTPCNGVEGFNCYFPLQSYGFQPTNGVGYQPYRVVVLSFELLHAPATVCGPKKSTNLVKNKCVNFNFNGLTGTGVLTESNKKFLPFQQFGRDIADTTDAVRDPQTLEILDITPCSFGGVSVITPGTNTSNQVAVLYQDVNCTEVPVAIHADQLTPTWRVYSTGSNVFQTRAGCLIGAEHVNNSYECDIPIGAGICASYQTQTNSPGSASSVASQSIIAYTMSLGAENSVAYSNNSIAIPTNFTISVTTEILPVSMTKTSVDCTMYICGDSTECSNLLLQYGSFCTQLNRALTGIAVEQDKNTQEVFAQVKQIYKTPPIKDFGGFNFSQILPDPSKPSKRSFIEDLLFNKVTLADAGFIKQYGDCLGDIAARDLICAQKFNGLTVLPPLLTDEMIAQYTSALLAGTITSGWTFGAGAALQIPFAMQMAYRFNGIGVTQNVLYENQKLIANQFNSAIGKIQDSLSSTASALGKLQDVVNQNAQALNTLVKQLSSNFGAISSVLNDILSRLDPPEAEVQIDRLITGRLQSLQTYVTQQLIRAAEIRASANLAATKMSECVLGQSKRVDFCGKGYHLMSFPQSAPHGVVFLHVTYVPAQEKNFTTAPAICHDGKAHFPREGVFVSNGTHWFVTQRNFYEPQIITTDNTFVSGNCDVVIGIVNNTVYDPLQSELDSIKEELDKIHKNGSGGSGDIIKLLNEQVNKEMQSSNLYMSMSSWCYTHSLDGAGLFLFDHAAEEYEHAKKLIIFLNENNVPVQLTSISAPEHKFEGLTQIFQKAYEHEQHISESINNIVDHAIKSKDHATFNFLQWYVAEQHEEEVLFKDILDKIELIGNENHGLYLADQYVKGIAKSRKSGS

SEQ ID NO: 216 - protein, 1723 aa, synthetic construct
NITNLCPFGEVFNATKFPSVYAWERKKISNCVADYSVLYNSTFFSTFKCYGVSATKLNDLCFSNVYADSFVVKGDDVRQIAPGQTGVIADYNYKLPDDFMGCVLAWNTRNIDATSTGNYNYKYRYLRHGKLRPFERDISNVPFSPDGKPCTPPALNCYWPLNDYGFYTTTGIGYQPYRVVVLSFELLNAPATVCGPGSGGSGNITNLCPFDEVFNATRFASVYAWNRKRISNCVADYSVLYNFAPFFAFKCYGVSPTKLNDLCFTNVYADSFVIRGNEVSQIAPGQTGNIADYNYKLPDDFTGCVIAWNSNKLDSKVGGNYNYRYRLFRKSNLKPFERDISTEIYQAGNKPCNGVAGVNCYFPLQSYGFRPTYGVGHQPYRVVVLSFELLHAPATVCGPGSGGSGSSQCVNLTTRTQLPPAYTNSFTRGVYYPDKVFRSSVLHSTQDLFLPFFSNVTWFHAIHVSGTNGTKRFDNPVLPFNDGVYFASTEKSNIIRGWIFGTTLDSKTQSLLIVNNATNVVIKVCEFQFCNDPFLGVYYHKNNKSWMESEFRVYSSANNCTFEYVSQPFLMDLEGKQGNFKNLREFVFKNIDGYFKIYSKHTPINLVRDLPQGFSALEPLVDLPIGINITRFQTLLALHRSYLTPGDSSSGWTAGAAAYYVGYLQPRTFLLKYNENGTITDAVDCALDPLSETKCTLKSFTVEKGIYQTSNFRVQPTESIVRFPNITNLCPFGEVFNATRFASVYAWNRKRISNCVADYSVLYNSASFSTFKCYGVSPTKLNDLCFTNVYADSFVIRGDEVRQIAPGQTGKIADYNYKLPDDFTGCVIAWNSNNLDSKVGGNYNYLYRLFRKSNLKPFERDISTEIYQAGSTPCNGVEGFNCYFPLQSYGFQPTNGVGYQPYRVVVLSFELLHAPATVCGPKKSTNLVKNKCVNFNFNGLTGTGVLTESNKKFLPFQQFGRDIADTTDAVRDPQTLEILDITPCSFGGVSVITPGTNTSNQVAVLYQDVNCTEVPVAIHADQLTPTWRVYSTGSNVFQTRAGCLIGAEHVNNSYECDIPIGAGICASYQTQTNSPGSASSVASQSIIAYTMSLGAENSVAYSNNSIAIPTNFTISVTTEILPVSMTKTSVDCTMYICGDSTECSNLLLQYGSFCTQLNRALTGIAVEQDKNTQEVFAQVKQIYKTPPIKDFGGFNFSQILPDPSKPSKRSFIEDLLFNKVTLADAGFIKQYGDCLGDIAARDLICAQKFNGLTVLPPLLTDEMIAQYTSALLAGTITSGWTFGAGAALQIPFAMQMAYRFNGIGVTQNVLYENQKLIANQFNSAIGKIQDSLSSTASALGKLQDVVNQNAQALNTLVKQLSSNFGAISSVLNDILSRLDPPEAEVQIDRLITGRLQSLQTYVTQQLIRAAEIRASANLAATKMSECVLGQSKRVDFCGKGYHLMSFPQSAPHGVVFLHVTYVPAQEKNFTTAPAICHDGKAHFPREGVFVSNGTHWFVTQRNFYEPQIITTDNTFVSGNCDVVIGIVNNTVYDPLQSELDSIKEELDKIHKNGSGGSGDIIKLLNEQVNKEMQSSNLYMSMSSWCYTHSLDGAGLFLFDHAAEEYEHAKKLIIFLNENNVPVQLTSISAPEHKFEGLTQIFQKAYEHEQHISESINNIVDHAIKSKDHATFNFLQWYVAEQHEEEVLFKDILDKIELIGNENHGLYLADQYVKGIAKSRKSGS

SEQ ID NO: 217 - protein, 1318 aa, synthetic construct
SSQCVNLTTRTQLPPAYTNSFTRGVYYPDKVFRSSVLHSTQDLFLPFFSNVTWFHAIHVSGTNGTKRFDNPVLPFNDGVYFASTEKSNIIRGWIFGTTLDSKTQSLLIVNNATNVVIKVCEFQFCNDPFLGVYYHKNNKSWMESEFRVYSSANNCTFEYVSQPFLMDLEGKQGNFKNLREFVFKNIDGYFKIYSKHTPINLVRDLPQGFSALEPLVDLPIGINITRFQTLLALHRSYLTPGDSSSGWTAGAAAYYVGYLQPRTFLLKYNENGTITDAVDCALDPLSETKCTLKSFTVEKGIYQTSNFRVQPTESIVRFPNITNLCPFDEVFNATRFASVYAWNRKRISNCVADYSVLYNFAPFFAFKCYGVSPTKLNDLCFTNVYADSFVIRGNEVSQIAPGQTGNIADYNYKLPDDFTGCVIAWNSNKLDSKVGGNYNYRYRLFRKSNLKPFERDISTEIYQAGNKPCNGVAGVNCYFPLQSYGFRPTYGVGHQPYRVVVLSFELLHAPATVCGPKKSTNLVKNKCVNFNFNGLTGTGVLTESNKKFLPFQQFGRDIADTTDAVRDPQTLEILDITPCSFGGVSVITPGTNTSNQVAVLYQDVNCTEVPVAIHADQLTPTWRVYSTGSNVFQTRAGCLIGAEHVNNSYECDIPIGAGICASYQTQTNSPGSASSVASQSIIAYTMSLGAENSVAYSNNSIAIPTNFTISVTTEILPVSMTKTSVDCTMYICGDSTECSNLLLQYGSFCTQLNRALTGIAVEQDKNTQEVFAQVKQIYKTPPIKDFGGFNFSQILPDPSKPSKRSFIEDLLFNKVTLADAGFIKQYGDCLGDIAARDLICAQKFNGLTVLPPLLTDEMIAQYTSALLAGTITSGWTFGAGAALQIPFAMQMAYRFNGIGVTQNVLYENQKLIANQFNSAIGKIQDSLSSTASALGKLQDVVNQNAQALNTLVKQLSSNFGAISSVLNDILSRLDPPEAEVQIDRLITGRLQSLQTYVTQQLIRAAEIRASANLAATKMSECVLGQSKRVDFCGKGYHLMSFPQSAPHGVVFLHVTYVPAQEKNFTTAPAICHDGKAHFPREGVFVSNGTHWFVTQRNFYEPQIITTDNTFVSGNCDVVIGIVNNTVYDPLQSELDSIKEELDKIHKNGSGGSGDIIKLLNEQVNKEMQSSNLYMSMSSWCYTHSLDGAGLFLFDHAAEEYEHAKKLIIFLNENNVPVQLTSISAPEHKFEGLTQIFQKAYEHEQHISESINNIVDHAIKSKDHATFNFLQWYVAEQHEEEVLFKDILDKIELIGNENHGLYLADQYVKGIAKSRKSGS

SEQ ID NO: 218 - protein, 1318 aa, synthetic construct
SSQCVNLTTRTQLPPAYTNSFTRGVYYPDKVFRSSVLHSTQDLFLPFFSNVTWFHAIHVSGTNGTKRFDNPVLPFNDGVYFASTEKSNIIRGWIFGTTLDSKTQSLLIVNNATNVVIKVCEFQFCNDPFLGVYYHKNNKSWMESEFRVYSSANNCTFEYVSQPFLMDLEGKQGNFKNLREFVFKNIDGYFKIYSKHTPINLVRDLPQGFSALEPLVDLPIGINITRFQTLLALHRSYLTPGDSSSGWTAGAAAYYVGYLQPRTFLLKYNENGTITDAVDCALDPLSETKCTLKSFTVEKGIYQTSNFRVQPTESIVRFPNITNLCPFDEVFNATRFASVYAWNRKRISNCVADYSVLYNFAPFFAFKCYGVSPTKLNDLCFTNVYADSFVIRGNEVSQIAPGQTGNIADYNYKLPDDFTGCVIAWNSNKLDSKVGGNYNYQYRLFRKSNLKPFERDISTEIYQAGNKPCNGVAGFNCYFPLRSYGFRPTYGVGHQPYRVVVLSFELLHAPATVCGPKKSTNLVKNKCVNFNFNGLTGTGVLTESNKKFLPFQQFGRDIADTTDAVRDPQTLEILDITPCSFGGVSVITPGTNTSNQVAVLYQDVNCTEVPVAIHADQLTPTWRVYSTGSNVFQTRAGCLIGAEHVNNSYECDIPIGAGICASYQTQTNSPGSASSVASQSIIAYTMSLGAENSVAYSNNSIAIPTNFTISVTTEILPVSMTKTSVDCTMYICGDSTECSNLLLQYGSFCTQLNRALTGIAVEQDKNTQEVFAQVKQIYKTPPIKDFGGFNFSQILPDPSKPSKRSFIEDLLFNKVTLADAGFIKQYGDCLGDIAARDLICAQKFNGLTVLPPLLTDEMIAQYTSALLAGTITSGWTFGAGAALQIPFAMQMAYRFNGIGVTQNVLYENQKLIANQFNSAIGKIQDSLSSTASALGKLQDVVNQNAQALNTLVKQLSSNFGAISSVLNDILSRLDPPEAEVQIDRLITGRLQSLQTYVTQQLIRAAEIRASANLAATKMSECVLGQSKRVDFCGKGYHLMSFPQSAPHGVVFLHVTYVPAQEKNFTTAPAICHDGKAHFPREGVFVSNGTHWFVTQRNFYEPQIITTDNTFVSGNCDVVIGIVNNTVYDPLQSELDSIKEELDKIHKNGSGGSGDIIKLLNEQVNKEMQSSNLYMSMSSWCYTHSLDGAGLFLFDHAAEEYEHAKKLIIFLNENNVPVQLTSISAPEHKFEGLTQIFQKAYEHEQHISESINNIVDHAIKSKDHATFNFLQWYVAEQHEEEVLFKDILDKIELIGNENHGLYLADQYVKGIAKSRKSGS

SEQ ID NO: 219 - protein, 1314 aa, synthetic construct
SSQCVNLTTRTQLPPAYTNSFTRGVYYPDKVFRSSVLHSTQDLFLPFFSNVTWFHAIHVSGTNGTKRFDNPVLPFNDGVYFASTEKSNIIRGWIFGTTLDSKTQSLLIVNNATNVVIKVCEFQFCNDPFLGVYYHKNNKSWMESEFRVYSSANNCTFEYVSQPFLMDLEGKQGNFKNLREFVFKNIDGYFKIYSKHTPINLVRDLPQGFSALEPLVDLPIGINITRFQTLLALHRSYLTPGDSSSGWTAGAAAYYVGYLQPRTFLLKYNENGTITDAVDCALDPLSETKCTLKSFTVEKGIYQTSNFRVQPTESIVRFPNITQLCPFNEVFNITSFPSVYAWERMRITNCVADYSVLYNSSASFSTFQCYGVSPTKLNDLCFSSVYADYFVVKGDDVRQIAPAQTGVIADYNYKLPDDFTGCVIAWNTNSLDSSNEFFYRRFRHGKIKPYGRDLSNVLFNPSGGTCSAEGLNCYKPLASYGFTQSSGIGFQPYRVVVLSFELLNAPATVCGPKKSTNLVKNKCVNFNFNGLTGTGVLTESNKKFLPFQQFGRDIADTTDAVRDPQTLEILDITPCSFGGVSVITPGTNTSNQVAVLYQDVNCTEVPVAIHADQLTPTWRVYSTGSNVFQTRAGCLIGAEHVNNSYECDIPIGAGICASYQTQTNSPGSASSVASQSIIAYTMSLGAENSVAYSNNSIAIPTNFTISVTTEILPVSMTKTSVDCTMYICGDSTECSNLLLQYGSFCTQLNRALTGIAVEQDKNTQEVFAQVKQIYKTPPIKDFGGFNFSQILPDPSKPSKRSFIEDLLFNKVTLADAGFIKQYGDCLGDIAARDLICAQKFNGLTVLPPLLTDEMIAQYTSALLAGTITSGWTFGAGAALQIPFAMQMAYRFNGIGVTQNVLYENQKLIANQFNSAIGKIQDSLSSTASALGKLQDVVNQNAQALNTLVKQLSSNFGAISSVLNDILSRLDPPEAEVQIDRLITGRLQSLQTYVTQQLIRAAEIRASANLAATKMSECVLGQSKRVDFCGKGYHLMSFPQSAPHGVVFLHVTYVPAQEKNFTTAPAICHDGKAHFPREGVFVSNGTHWFVTQRNFYEPQIITTDNTFVSGNCDVVIGIVNNTVYDPLQSELDSIKEELDKIHKNGSGGSGDIIKLLNEQVNKEMQSSNLYMSMSSWCYTHSLDGAGLFLFDHAAEEYEHAKKLIIFLNENNVPVQLTSISAPEHKFEGLTQIFQKAYEHEQHISESINNIVDHAIKSKDHATFNFLQWYVAEQHEEEVLFKDILDKIELIGNENHGLYLADQYVKGIAKSRKSGS

SEQ ID NO: 220 - protein, 1314 aa, synthetic construct
SSQCVNLTTRTQLPPAYTNSFTRGVYYPDKVFRSSVLHSTQDLFLPFFSNVTWFHAIHVSGTNGTKRFDNPVLPFNDGVYFASTEKSNIIRGWIFGTTLDSKTQSLLIVNNATNVVIKVCEFQFCNDPFLGVYYHKNNKSWMESEFRVYSSANNCTFEYVSQPFLMDLEGKQGNFKNLREFVFKNIDGYFKIYSKHTPINLVRDLPQGFSALEPLVDLPIGINITRFQTLLALHRSYLTPGDSSSGWTAGAAAYYVGYLQPRTFLLKYNENGTITDAVDCALDPLSETKCTLKSFTVEKGIYQTSNFRVQPTESIVRFPNITQLCPFNEVFNITSFPSVYAWERMRITNCVADYSVLYNSSASFSTFQCYGVSPTKLNDLCFSSVYADYFVVKGDDVRQIAPAQTGVIADYNYKLPDDFTGCVIAWNTNSLDSSNEFFYRRFRHGKIKPYGRDLSNVLFNPSGGTCSAEGLNCYKPLASYGFWQSSGIGFQPYRVVVLSFELLNAPATVCGPKKSTNLVKNKCVNFNFNGLTGTGVLTESNKKFLPFQQFGRDIADTTDAVRDPQTLEILDITPCSFGGVSVITPGTNTSNQVAVLYQDVNCTEVPVAIHADQLTPTWRVYSTGSNVFQTRAGCLIGAEHVNNSYECDIPIGAGICASYQTQTNSPGSASSVASQSIIAYTMSLGAENSVAYSNNSIAIPTNFTISVTTEILPVSMTKTSVDCTMYICGDSTECSNLLLQYGSFCTQLNRALTGIAVEQDKNTQEVFAQVKQIYKTPPIKDFGGFNFSQILPDPSKPSKRSFIEDLLFNKVTLADAGFIKQYGDCLGDIAARDLICAQKFNGLTVLPPLLTDEMIAQYTSALLAGTITSGWTFGAGAALQIPFAMQMAYRFNGIGVTQNVLYENQKLIANQFNSAIGKIQDSLSSTASALGKLQDVVNQNAQALNTLVKQLSSNFGAISSVLNDILSRLDPPEAEVQIDRLITGRLQSLQTYVTQQLIRAAEIRASANLAATKMSECVLGQSKRVDFCGKGYHLMSFPQSAPHGVVFLHVTYVPAQEKNFTTAPAICHDGKAHFPREGVFVSNGTHWFVTQRNFYEPQIITTDNTFVSGNCDVVIGIVNNTVYDPLQSELDSIKEELDKIHKNGSGGSGDIIKLLNEQVNKEMQSSNLYMSMSSWCYTHSLDGAGLFLFDHAAEEYEHAKKLIIFLNENNVPVQLTSISAPEHKFEGLTQIFQKAYEHEQHISESINNIVDHAIKSKDHATFNFLQWYVAEQHEEEVLFKDILDKIELIGNENHGLYLADQYVKGIAKSRKSGS

SEQ ID NO: 221 - protein, 1314 aa, synthetic construct
SSQCVNLTTRTQLPPAYTNSFTRGVYYPDKVFRSSVLHSTQDLFLPFFSNVTWFHAIHVSGTNGTKRFDNPVLPFNDGVYFASTEKSNIIRGWIFGTTLDSKTQSLLIVNNATNVVIKVCEFQFCNDPFLGVYYHKNNKSWMESEFRVYSSANNCTFEYVSQPFLMDLEGKQGNFKNLREFVFKNIDGYFKIYSKHTPINLVRDLPQGFSALEPLVDLPIGINITRFQTLLALHRSYLTPGDSSSGWTAGAAAYYVGYLQPRTFLLKYNENGTITDAVDCALDPLSETKCTLKSFTVEKGIYQTSNFRVQPTESIVRFPNITQLCPFNEVFNITSFPSVYAWERMRITNCVADYSVLYNSSASFSTFQCYGVSPTKLNDLCFSSVYADYFVVKGDDVRQIAPAQTGVIADYNYKLPDDFTGCVIAWNTNSLDSSNEFFYRRFRHGKIKPYGRDLSNVLFNPSGGTCSAEGLNCYKPLYSYGFWQSSGIGFQPYRVVVLSFELLNAPATVCGPKKSTNLVKNKCVNFNFNGLTGTGVLTESNKKFLPFQQFGRDIADTTDAVRDPQTLEILDITPCSFGGVSVITPGTNTSNQVAVLYQDVNCTEVPVAIHADQLTPTWRVYSTGSNVFQTRAGCLIGAEHVNNSYECDIPIGAGICASYQTQTNSPGSASSVASQSIIAYTMSLGAENSVAYSNNSIAIPTNFTISVTTEILPVSMTKTSVDCTMYICGDSTECSNLLLQYGSFCTQLNRALTGIAVEQDKNTQEVFAQVKQIYKTPPIKDFGGFNFSQILPDPSKPSKRSFIEDLLFNKVTLADAGFIKQYGDCLGDIAARDLICAQKFNGLTVLPPLLTDEMIAQYTSALLAGTITSGWTFGAGAALQIPFAMQMAYRFNGIGVTQNVLYENQKLIANQFNSAIGKIQDSLSSTASALGKLQDVVNQNAQALNTLVKQLSSNFGAISSVLNDILSRLDPPEAEVQIDRLITGRLQSLQTYVTQQLIRAAEIRASANLAATKMSECVLGQSKRVDFCGKGYHLMSFPQSAPHGVVFLHVTYVPAQEKNFTTAPAICHDGKAHFPREGVFVSNGTHWFVTQRNFYEPQIITTDNTFVSGNCDVVIGIVNNTVYDPLQSELDSIKEELDKIHKNGSGGSGDIIKLLNEQVNKEMQSSNLYMSMSSWCYTHSLDGAGLFLFDHAAEEYEHAKKLIIFLNENNVPVQLTSISAPEHKFEGLTQIFQKAYEHEQHISESINNIVDHAIKSKDHATFNFLQWYVAEQHEEEVLFKDILDKIELIGNENHGLYLADQYVKGIAKSRKSGS

SEQ ID NO: 222 - protein, 1317 aa, synthetic construct
SSQCVNLTTRTQLPPAYTNSFTRGVYYPDKVFRSSVLHSTQDLFLPFFSNVTWFHAIHVSGTNGTKRFDNPVLPFNDGVYFASTEKSNIIRGWIFGTTLDSKTQSLLIVNNATNVVIKVCEFQFCNDPFLGVYYHKNNKSWMESEFRVYSSANNCTFEYVSQPFLMDLEGKQGNFKNLREFVFKNIDGYFKIYSKHTPINLVRDLPQGFSALEPLVDLPIGINITRFQTLLALHRSYLTPGDSSSGWTAGAAAYYVGYLQPRTFLLKYNENGTITDAVDCALDPLSETKCTLKSFTVEKGIYQTSNFRVQPTESIVRFPNITNLCPFGEVFNATTFPSVYAWERKRISNCVADYSVLYNSTSFSTFKCYGVSATKLNDLCFSNVYADSFVVKGDDVRQIAPGQTGVIADYNYKLPDDFLGCVLAWNTNSKDSSTSGNYNYLYRWVRRSKLNPYERDLSNDIYSPGGQSCSAVGPNCYNPLRPYGFFTTAGVGHQPYRVVVLSFELLNAPATVCGPKKSTNLVKNKCVNFNFNGLTGTGVLTESNKKFLPFQQFGRDIADTTDAVRDPQTLEILDITPCSFGGVSVITPGTNTSNQVAVLYQDVNCTEVPVAIHADQLTPTWRVYSTGSNVFQTRAGCLIGAEHVNNSYECDIPIGAGICASYQTQTNSPGSASSVASQSIIAYTMSLGAENSVAYSNNSIAIPTNFTISVTTEILPVSMTKTSVDCTMYICGDSTECSNLLLQYGSFCTQLNRALTGIAVEQDKNTQEVFAQVKQIYKTPPIKDFGGFNFSQILPDPSKPSKRSFIEDLLFNKVTLADAGFIKQYGDCLGDIAARDLICAQKFNGLTVLPPLLTDEMIAQYTSALLAGTITSGWTFGAGAALQIPFAMQMAYRFNGIGVTQNVLYENQKLIANQFNSAIGKIQDSLSSTASALGKLQDVVNQNAQALNTLVKQLSSNFGAISSVLNDILSRLDPPEAEVQIDRLITGRLQSLQTYVTQQLIRAAEIRASANLAATKMSECVLGQSKRVDFCGKGYHLMSFPQSAPHGVVFLHVTYVPAQEKNFTTAPAICHDGKAHFPREGVFVSNGTHWFVTQRNFYEPQIITTDNTFVSGNCDVVIGIVNNTVYDPLQSELDSIKEELDKIHKNGSGGSGDIIKLLNEQVNKEMQSSNLYMSMSSWCYTHSLDGAGLFLFDHAAEEYEHAKKLIIFLNENNVPVQLTSISAPEHKFEGLTQIFQKAYEHEQHISESINNIVDHAIKSKDHATFNFLQWYVAEQHEEEVLFKDILDKIELIGNENHGLYLADQYVKGIAKSRKSGS

SEQ ID NO: 223 - protein, 1317 aa, synthetic construct
SSQCVNLTTRTQLPPAYTNSFTRGVYYPDKVFRSSVLHSTQDLFLPFFSNVTWFHAIHVSGTNGTKRFDNPVLPFNDGVYFASTEKSNIIRGWIFGTTLDSKTQSLLIVNNATNVVIKVCEFQFCNDPFLGVYYHKNNKSWMESEFRVYSSANNCTFEYVSQPFLMDLEGKQGNFKNLREFVFKNIDGYFKIYSKHTPINLVRDLPQGFSALEPLVDLPIGINITRFQTLLALHRSYLTPGDSSSGWTAGAAAYYVGYLQPRTFLLKYNENGTITDAVDCALDPLSETKCTLKSFTVEKGIYQTSNFRVQPTESIVRFPNITNLCPFGEVFNATTFPSVYAWERKRISNCVADYSVLYNSTSFSTFKCYGVSATKLNDLCFSNVYADSFVVKGDDVRQIAPGQTGVIADYNYKLPDDFTGCVLAWNTRNIDATQTGNYNYKYRSLRHGKLRPFERDISNVPFSPDGKPCTPPAFNCYWPLNDYGFYITNGIGYQPYRVVVLSFELLNAPATVCGPKKSTNLVKNKCVNFNFNGLTGTGVLTESNKKFLPFQQFGRDIADTTDAVRDPQTLEILDITPCSFGGVSVITPGTNTSNQVAVLYQDVNCTEVPVAIHADQLTPTWRVYSTGSNVFQTRAGCLIGAEHVNNSYECDIPIGAGICASYQTQTNSPGSASSVASQSIIAYTMSLGAENSVAYSNNSIAIPTNFTISVTTEILPVSMTKTSVDCTMYICGDSTECSNLLLQYGSFCTQLNRALTGIAVEQDKNTQEVFAQVKQIYKTPPIKDFGGFNFSQILPDPSKPSKRSFIEDLLFNKVTLADAGFIKQYGDCLGDIAARDLICAQKFNGLTVLPPLLTDEMIAQYTSALLAGTITSGWTFGAGAALQIPFAMQMAYRFNGIGVTQNVLYENQKLIANQFNSAIGKIQDSLSSTASALGKLQDVVNQNAQALNTLVKQLSSNFGAISSVLNDILSRLDPPEAEVQIDRLITGRLQSLQTYVTQQLIRAAEIRASANLAATKMSECVLGQSKRVDFCGKGYHLMSFPQSAPHGVVFLHVTYVPAQEKNFTTAPAICHDGKAHFPREGVFVSNGTHWFVTQRNFYEPQIITTDNTFVSGNCDVVIGIVNNTVYDPLQSELDSIKEELDKIHKNGSGGSGDIIKLLNEQVNKEMQSSNLYMSMSSWCYTHSLDGAGLFLFDHAAEEYEHAKKLIIFLNENNVPVQLTSISAPEHKFEGLTQIFQKAYEHEQHISESINNIVDHAIKSKDHATFNFLQWYVAEQHEEEVLFKDILDKIELIGNENHGLYLADQYVKGIAKSRKSGS

SEQ ID NO: 224 - protein, 1299 aa, synthetic construct
SSQCVNLTTRTQLPPAYTNSFTRGVYYPDKVFRSSVLHSTQDLFLPFFSNVTWFHAIHVSGTNGTKRFDNPVLPFNDGVYFASTEKSNIIRGWIFGTTLDSKTQSLLIVNNATNVVIKVCEFQFCNDPFLGVYYHKNNKSWMESEFRVYSSANNCTFEYVSQPFLMDLEGKQGNFKNLREFVFKNIDGYFKIYSKHTPINLVRDLPQGFSALEPLVDLPIGINITRFQTLLALHRSYLTPGDSSSGWTAGAAAYYVGYLQPRTFLLKYNENGTITDAVDCALDPLSETKCTLKSFTVEKGIYQTSNFRVQPTESIVRFPNITNVCPFHKVFNATRFPSVYAWERTKISDCIADYTVFYNSTSFSTFKCYGVSPSKLIDLCFTSVYADTFLIRFSEVRQVAPGQTGVIADYNYKLPDDFTGCVIAWNTAKQDTGHYFYRSHRSTKLKPFERDLSSDENGVRTLSTYDFNPNVPLEYQATRVVVLSFELLNAPATVCGPKKSTNLVKNKCVNFNFNGLTGTGVLTESNKKFLPFQQFGRDIADTTDAVRDPQTLEILDITPCSFGGVSVITPGTNTSNQVAVLYQDVNCTEVPVAIHADQLTPTWRVYSTGSNVFQTRAGCLIGAEHVNNSYECDIPIGAGICASYQTQTNSPGSASSVASQSIIAYTMSLGAENSVAYSNNSIAIPTNFTISVTTEILPVSMTKTSVDCTMYICGDSTECSNLLLQYGSFCTQLNRALTGIAVEQDKNTQEVFAQVKQIYKTPPIKDFGGFNFSQILPDPSKPSKRSFIEDLLFNKVTLADAGFIKQYGDCLGDIAARDLICAQKFNGLTVLPPLLTDEMIAQYTSALLAGTITSGWTFGAGAALQIPFAMQMAYRFNGIGVTQNVLYENQKLIANQFNSAIGKIQDSLSSTASALGKLQDVVNQNAQALNTLVKQLSSNFGAISSVLNDILSRLDPPEAEVQIDRLITGRLQSLQTYVTQQLIRAAEIRASANLAATKMSECVLGQSKRVDFCGKGYHLMSFPQSAPHGVVFLHVTYVPAQEKNFTTAPAICHDGKAHFPREGVFVSNGTHWFVTQRNFYEPQIITTDNTFVSGNCDVVIGIVNNTVYDPLQSELDSIKEELDKIHKNGSGGSGDIIKLLNEQVNKEMQSSNLYMSMSSWCYTHSLDGAGLFLFDHAAEEYEHAKKLIIFLNENNVPVQLTSISAPEHKFEGLTQIFQKAYEHEQHISESINNIVDHAIKSKDHATFNFLQWYVAEQHEEEVLFKDILDKIELIGNENHGLYLADQYVKGIAKSRKSGS

SEQ ID NO: 225 - protein, 1318 aa, synthetic construct
SSQCVNLTTRTQLPPAYTNSFTRGVYYPDKVFRSSVLHSTQDLFLPFFSNVTWFHAIHVSGTNGTKRFDNPVLPFNDGVYFASTEKSNIIRGWIFGTTLDSKTQSLLIVNNATNVVIKVCEFQFCNDPFLGVYYHKNNKSWMESEFRVYSSANNCTFEYVSQPFLMDLEGKQGNFKNLREFVFKNIDGYFKIYSKHTPINLVRDLPQGFSALEPLVDLPIGINITRFQTLLALHRSYLTPGDSSSGWTAGAAAYYVGYLQPRTFLLKYNENGTITDAVDCALDPLSETKCTLKSFTVEKGIYQTSNFRVQPTESIVRFPNITNLCPFGEVFNATTFASVYAWNRKRISNCVADYSVLYNSTSFSTFKCYGVSPTKLNDLCFTNVYADSFVVRGDEVRQIAPGQTGKIADYNYKLPDDFTGCVIAWNSNNLDSKVGGNYNYLYRLFRKSNLKPFERDISTEIYQAGSTPCNGVEGFNCYFPLQSYGFHPTNGVGYQPYRVVVLSFELLNAPATVCGPKKSTNLVKNKCVNFNFNGLTGTGVLTESNKKFLPFQQFGRDIADTTDAVRDPQTLEILDITPCSFGGVSVITPGTNTSNQVAVLYQDVNCTEVPVAIHADQLTPTWRVYSTGSNVFQTRAGCLIGAEHVNNSYECDIPIGAGICASYQTQTNSPGSASSVASQSIIAYTMSLGAENSVAYSNNSIAIPTNFTISVTTEILPVSMTKTSVDCTMYICGDSTECSNLLLQYGSFCTQLNRALTGIAVEQDKNTQEVFAQVKQIYKTPPIKDFGGFNFSQILPDPSKPSKRSFIEDLLFNKVTLADAGFIKQYGDCLGDIAARDLICAQKFNGLTVLPPLLTDEMIAQYTSALLAGTITSGWTFGAGAALQIPFAMQMAYRFNGIGVTQNVLYENQKLIANQFNSAIGKIQDSLSSTASALGKLQDVVNQNAQALNTLVKQLSSNFGAISSVLNDILSRLDPPEAEVQIDRLITGRLQSLQTYVTQQLIRAAEIRASANLAATKMSECVLGQSKRVDFCGKGYHLMSFPQSAPHGVVFLHVTYVPAQEKNFTTAPAICHDGKAHFPREGVFVSNGTHWFVTQRNFYEPQIITTDNTFVSGNCDVVIGIVNNTVYDPLQSELDSIKEELDKIHKNGSGGSGDIIKLLNEQVNKEMQSSNLYMSMSSWCYTHSLDGAGLFLFDHAAEEYEHAKKLIIFLNENNVPVQLTSISAPEHKFEGLTQIFQKAYEHEQHISESINNIVDHAIKSKDHATFNFLQWYVAEQHEEEVLFKDILDKIELIGNENHGLYLADQYVKGIAKSRKSGS

SEQ ID NO: 226 - protein, 1318 aa, synthetic construct
SSQCVNLTTRTQLPPAYTNSFTRGVYYPDKVFRSSVLHSTQDLFLPFFSNVTWFHAIHVSGTNGTKRFDNPVLPFNDGVYFASTEKSNIIRGWIFGTTLDSKTQSLLIVNNATNVVIKVCEFQFCNDPFLGVYYHKNNKSWMESEFRVYSSANNCTFEYVSQPFLMDLEGKQGNFKNLREFVFKNIDGYFKIYSKHTPINLVRDLPQGFSALEPLVDLPIGINITRFQTLLALHRSYLTPGDSSSGWTAGAAAYYVGYLQPRTFLLKYNENGTITDAVDCALDPLSETKCTLKSFTVEKGIYQTSNFRVQPTESIVRFPNITNLCPFGEVFNATTFASVYAWNRKRISNCVADYSVLYNSTSFSTFKCYGVSPTKLNDLCFTNVYADSFVITGDEVRQIAPGQTGKIADYNYKLPDDFTGCVIAWNSKHIDAKEGGNFNYLYRLFRKANLKPFERDISTEIYQAGSKPCNGQTGLNCYYPLYRYGFYPTDGVGHQPYRVVVLSFELLNAPATVCGPKKSTNLVKNKCVNFNFNGLTGTGVLTESNKKFLPFQQFGRDIADTTDAVRDPQTLEILDITPCSFGGVSVITPGTNTSNQVAVLYQDVNCTEVPVAIHADQLTPTWRVYSTGSNVFQTRAGCLIGAEHVNNSYECDIPIGAGICASYQTQTNSPGSASSVASQSIIAYTMSLGAENSVAYSNNSIAIPTNFTISVTTEILPVSMTKTSVDCTMYICGDSTECSNLLLQYGSFCTQLNRALTGIAVEQDKNTQEVFAQVKQIYKTPPIKDFGGFNFSQILPDPSKPSKRSFIEDLLFNKVTLADAGFIKQYGDCLGDIAARDLICAQKFNGLTVLPPLLTDEMIAQYTSALLAGTITSGWTFGAGAALQIPFAMQMAYRFNGIGVTQNVLYENQKLIANQFNSAIGKIQDSLSSTASALGKLQDVVNQNAQALNTLVKQLSSNFGAISSVLNDILSRLDPPEAEVQIDRLITGRLQSLQTYVTQQLIRAAEIRASANLAATKMSECVLGQSKRVDFCGKGYHLMSFPQSAPHGVVFLHVTYVPAQEKNFTTAPAICHDGKAHFPREGVFVSNGTHWFVTQRNFYEPQIITTDNTFVSGNCDVVIGIVNNTVYDPLQSELDSIKEELDKIHKNGSGGSGDIIKLLNEQVNKEMQSSNLYMSMSSWCYTHSLDGAGLFLFDHAAEEYEHAKKLIIFLNENNVPVQLTSISAPEHKFEGLTQIFQKAYEHEQHISESINNIVDHAIKSKDHATFNFLQWYVAEQHEEEVLFKDILDKIELIGNENHGLYLADQYVKGIAKSRKSGS

SEQ ID NO: 227 - protein, 1299 aa, synthetic construct
SSQCVNLTTRTQLPPAYTNSFTRGVYYPDKVFRSSVLHSTQDLFLPFFSNVTWFHAIHVSGTNGTKRFDNPVLPFNDGVYFASTEKSNIIRGWIFGTTLDSKTQSLLIVNNATNVVIKVCEFQFCNDPFLGVYYHKNNKSWMESEFRVYSSANNCTFEYVSQPFLMDLEGKQGNFKNLREFVFKNIDGYFKIYSKHTPINLVRDLPQGFSALEPLVDLPIGINITRFQTLLALHRSYLTPGDSSSGWTAGAAAYYVGYLQPRTFLLKYNENGTITDAVDCALDPLSETKCTLKSFTVEKGIYQTSNFRVQPTESIVRFPNITNFCPFDKVFNATRFPNVYAWQRTKISDCIADYTVLYNSTSFSTFKCYGVSPSKLIDLCFTSVYADTFLIRFSEVRQIAPGETGVIADYNYKLPDDFTGCVLAWNTAQQDIGSYFYRSHRAVKLKPFERDLSSDENGVRTLSTYDFNPNVPLDYQATRVVVLSFELLNAPATVCGPKKSTNLVKNKCVNFNFNGLTGTGVLTESNKKFLPFQQFGRDIADTTDAVRDPQTLEILDITPCSFGGVSVITPGTNTSNQVAVLYQDVNCTEVPVAIHADQLTPTWRVYSTGSNVFQTRAGCLIGAEHVNNSYECDIPIGAGICASYQTQTNSPGSASSVASQSIIAYTMSLGAENSVAYSNNSIAIPTNFTISVTTEILPVSMTKTSVDCTMYICGDSTECSNLLLQYGSFCTQLNRALTGIAVEQDKNTQEVFAQVKQIYKTPPIKDFGGFNFSQILPDPSKPSKRSFIEDLLFNKVTLADAGFIKQYGDCLGDIAARDLICAQKFNGLTVLPPLLTDEMIAQYTSALLAGTITSGWTFGAGAALQIPFAMQMAYRFNGIGVTQNVLYENQKLIANQFNSAIGKIQDSLSSTASALGKLQDVVNQNAQALNTLVKQLSSNFGAISSVLNDILSRLDPPEAEVQIDRLITGRLQSLQTYVTQQLIRAAEIRASANLAATKMSECVLGQSKRVDFCGKGYHLMSFPQSAPHGVVFLHVTYVPAQEKNFTTAPAICHDGKAHFPREGVFVSNGTHWFVTQRNFYEPQIITTDNTFVSGNCDVVIGIVNNTVYDPLQSELDSIKEELDKIHKNGSGGSGDIIKLLNEQVNKEMQSSNLYMSMSSWCYTHSLDGAGLFLFDHAAEEYEHAKKLIIFLNENNVPVQLTSISAPEHKFEGLTQIFQKAYEHEQHISESINNIVDHAIKSKDHATFNFLQWYVAEQHEEEVLFKDILDKIELIGNENHGLYLADQYVKGIAKSRKSGS

SEQ ID NO: 228 - protein, 1299 aa, synthetic construct
SSQCVNLTTRTQLPPAYTNSFTRGVYYPDKVFRSSVLHSTQDLFLPFFSNVTWFHAIHVSGTNGTKRFDNPVLPFNDGVYFASTEKSNIIRGWIFGTTLDSKTQSLLIVNNATNVVIKVCEFQFCNDPFLGVYYHKNNKSWMESEFRVYSSANNCTFEYVSQPFLMDLEGKQGNFKNLREFVFKNIDGYFKIYSKHTPINLVRDLPQGFSALEPLVDLPIGINITRFQTLLALHRSYLTPGDSSSGWTAGAAAYYVGYLQPRTFLLKYNENGTITDAVDCALDPLSETKCTLKSFTVEKGIYQTSNFRVQPTESIVRFPNITNFCPFDKVFNATRFPNVYAWQRTKISDCIADYTVLYNSTSFSTFKCYGVSPSKLIDLCFTSVYADTFLIRFSEVRQIAPGETGVIADYNYKLPDDFTGCVLAWNTAQQDIGSYFYRSHRAVKLKPFERDLSSDENGVRTLSTYDFWPNVPLDYQATRVVVLSFELLNAPATVCGPKKSTNLVKNKCVNFNFNGLTGTGVLTESNKKFLPFQQFGRDIADTTDAVRDPQTLEILDITPCSFGGVSVITPGTNTSNQVAVLYQDVNCTEVPVAIHADQLTPTWRVYSTGSNVFQTRAGCLIGAEHVNNSYECDIPIGAGICASYQTQTNSPGSASSVASQSIIAYTMSLGAENSVAYSNNSIAIPTNFTISVTTEILPVSMTKTSVDCTMYICGDSTECSNLLLQYGSFCTQLNRALTGIAVEQDKNTQEVFAQVKQIYKTPPIKDFGGFNFSQILPDPSKPSKRSFIEDLLFNKVTLADAGFIKQYGDCLGDIAARDLICAQKFNGLTVLPPLLTDEMIAQYTSALLAGTITSGWTFGAGAALQIPFAMQMAYRFNGIGVTQNVLYENQKLIANQFNSAIGKIQDSLSSTASALGKLQDVVNQNAQALNTLVKQLSSNFGAISSVLNDILSRLDPPEAEVQIDRLITGRLQSLQTYVTQQLIRAAEIRASANLAATKMSECVLGQSKRVDFCGKGYHLMSFPQSAPHGVVFLHVTYVPAQEKNFTTAPAICHDGKAHFPREGVFVSNGTHWFVTQRNFYEPQIITTDNTFVSGNCDVVIGIVNNTVYDPLQSELDSIKEELDKIHKNGSGGSGDIIKLLNEQVNKEMQSSNLYMSMSSWCYTHSLDGAGLFLFDHAAEEYEHAKKLIIFLNENNVPVQLTSISAPEHKFEGLTQIFQKAYEHEQHISESINNIVDHAIKSKDHATFNFLQWYVAEQHEEEVLFKDILDKIELIGNENHGLYLADQYVKGIAKSRKSGS

SEQ ID NO: 229 - protein, 1299 aa, synthetic construct
SSQCVNLTTRTQLPPAYTNSFTRGVYYPDKVFRSSVLHSTQDLFLPFFSNVTWFHAIHVSGTNGTKRFDNPVLPFNDGVYFASTEKSNIIRGWIFGTTLDSKTQSLLIVNNATNVVIKVCEFQFCNDPFLGVYYHKNNKSWMESEFRVYSSANNCTFEYVSQPFLMDLEGKQGNFKNLREFVFKNIDGYFKIYSKHTPINLVRDLPQGFSALEPLVDLPIGINITRFQTLLALHRSYLTPGDSSSGWTAGAAAYYVGYLQPRTFLLKYNENGTITDAVDCALDPLSETKCTLKSFTVEKGIYQTSNFRVQPTESIVRFPNITNFCPFDKVFNATRFPNVYAWQRTKISDCIADYTVLYNSTSFSTFKCYGVSPSKLIDLCFTSVYADTFLIRFSEVRQIAPGETGVIADYNYKLPDDFTGCVLAWNTAQQDIGSYFYRSHRAVKLKPFERDLSSDENGVRTLYTYDFWPNVPLDYQATRVVVLSFELLNAPATVCGPKKSTNLVKNKCVNFNFNGLTGTGVLTESNKKFLPFQQFGRDIADTTDAVRDPQTLEILDITPCSFGGVSVITPGTNTSNQVAVLYQDVNCTEVPVAIHADQLTPTWRVYSTGSNVFQTRAGCLIGAEHVNNSYECDIPIGAGICASYQTQTNSPGSASSVASQSIIAYTMSLGAENSVAYSNNSIAIPTNFTISVTTEILPVSMTKTSVDCTMYICGDSTECSNLLLQYGSFCTQLNRALTGIAVEQDKNTQEVFAQVKQIYKTPPIKDFGGFNFSQILPDPSKPSKRSFIEDLLFNKVTLADAGFIKQYGDCLGDIAARDLICAQKFNGLTVLPPLLTDEMIAQYTSALLAGTITSGWTFGAGAALQIPFAMQMAYRFNGIGVTQNVLYENQKLIANQFNSAIGKIQDSLSSTASALGKLQDVVNQNAQALNTLVKQLSSNFGAISSVLNDILSRLDPPEAEVQIDRLITGRLQSLQTYVTQQLIRAAEIRASANLAATKMSECVLGQSKRVDFCGKGYHLMSFPQSAPHGVVFLHVTYVPAQEKNFTTAPAICHDGKAHFPREGVFVSNGTHWFVTQRNFYEPQIITTDNTFVSGNCDVVIGIVNNTVYDPLQSELDSIKEELDKIHKNGSGGSGDIIKLLNEQVNKEMQSSNLYMSMSSWCYTHSLDGAGLFLFDHAAEEYEHAKKLIIFLNENNVPVQLTSISAPEHKFEGLTQIFQKAYEHEQHISESINNIVDHAIKSKDHATFNFLQWYVAEQHEEEVLFKDILDKIELIGNENHGLYLADQYVKGIAKSRKSGS

SEQ ID NO: 230 - protein, 1299 aa, synthetic construct
SSQCVNLTTRTQLPPAYTNSFTRGVYYPDKVFRSSVLHSTQDLFLPFFSNVTWFHAIHVSGTNGTKRFDNPVLPFNDGVYFASTEKSNIIRGWIFGTTLDSKTQSLLIVNNATNVVIKVCEFQFCNDPFLGVYYHKNNKSWMESEFRVYSSANNCTFEYVSQPFLMDLEGKQGNFKNLREFVFKNIDGYFKIYSKHTPINLVRDLPQGFSALEPLVDLPIGINITRFQTLLALHRSYLTPGDSSSGWTAGAAAYYVGYLQPRTFLLKYNENGTITDAVDCALDPLSETKCTLKSFTVEKGIYQTSNFRVQPTESIVRFPNITNLCPFDAVFNATRFPSVYAWERVKISNCVADYTAFYNSTSFSTFKCYGVSPSKLIDLCFTSVYADTFLIRFSEVRQVAPGETGVIADYNYKLPDDFTGCVIAWNTAKQDVGSYFYRSHRSSKLKPFERDLSSDENGVRTLSTYDFNPNVPLDYQATRVVVLSFELLNAPATVCGPKKSTNLVKNKCVNFNFNGLTGTGVLTESNKKFLPFQQFGRDIADTTDAVRDPQTLEILDITPCSFGGVSVITPGTNTSNQVAVLYQDVNCTEVPVAIHADQLTPTWRVYSTGSNVFQTRAGCLIGAEHVNNSYECDIPIGAGICASYQTQTNSPGSASSVASQSIIAYTMSLGAENSVAYSNNSIAIPTNFTISVTTEILPVSMTKTSVDCTMYICGDSTECSNLLLQYGSFCTQLNRALTGIAVEQDKNTQEVFAQVKQIYKTPPIKDFGGFNFSQILPDPSKPSKRSFIEDLLFNKVTLADAGFIKQYGDCLGDIAARDLICAQKFNGLTVLPPLLTDEMIAQYTSALLAGTITSGWTFGAGAALQIPFAMQMAYRFNGIGVTQNVLYENQKLIANQFNSAIGKIQDSLSSTASALGKLQDVVNQNAQALNTLVKQLSSNFGAISSVLNDILSRLDPPEAEVQIDRLITGRLQSLQTYVTQQLIRAAEIRASANLAATKMSECVLGQSKRVDFCGKGYHLMSFPQSAPHGVVFLHVTYVPAQEKNFTTAPAICHDGKAHFPREGVFVSNGTHWFVTQRNFYEPQIITTDNTFVSGNCDVVIGIVNNTVYDPLQSELDSIKEELDKIHKNGSGGSGDIIKLLNEQVNKEMQSSNLYMSMSSWCYTHSLDGAGLFLFDHAAEEYEHAKKLIIFLNENNVPVQLTSISAPEHKFEGLTQIFQKAYEHEQHISESINNIVDHAIKSKDHATFNFLQWYVAEQHEEEVLFKDILDKIELIGNENHGLYLADQYVKGIAKSRKSGS

SEQ ID NO: 231 - protein, 1299 aa, synthetic construct
SSQCVNLTTRTQLPPAYTNSFTRGVYYPDKVFRSSVLHSTQDLFLPFFSNVTWFHAIHVSGTNGTKRFDNPVLPFNDGVYFASTEKSNIIRGWIFGTTLDSKTQSLLIVNNATNVVIKVCEFQFCNDPFLGVYYHKNNKSWMESEFRVYSSANNCTFEYVSQPFLMDLEGKQGNFKNLREFVFKNIDGYFKIYSKHTPINLVRDLPQGFSALEPLVDLPIGINITRFQTLLALHRSYLTPGDSSSGWTAGAAAYYVGYLQPRTFLLKYNENGTITDAVDCALDPLSETKCTLKSFTVEKGIYQTSNFRVQPTESIVRFPNITNRCPFDKVFNATRFPSVYAWERTKISDCVADYTVLYNSTSFSTFKCYGVSPSKLIDLCFTSVYADTFLIRSSEVRQVAPGETGVIADYNYKLPDDFTGCVIAWNTANQDQGQYYYRSSRKEKLKPFERDLSSDENGVYTLSTYDFYPSVPLDYQATRVVVLSFELLNAPATVCGPKKSTNLVKNKCVNFNFNGLTGTGVLTESNKKFLPFQQFGRDIADTTDAVRDPQTLEILDITPCSFGGVSVITPGTNTSNQVAVLYQDVNCTEVPVAIHADQLTPTWRVYSTGSNVFQTRAGCLIGAEHVNNSYECDIPIGAGICASYQTQTNSPGSASSVASQSIIAYTMSLGAENSVAYSNNSIAIPTNFTISVTTEILPVSMTKTSVDCTMYICGDSTECSNLLLQYGSFCTQLNRALTGIAVEQDKNTQEVFAQVKQIYKTPPIKDFGGFNFSQILPDPSKPSKRSFIEDLLFNKVTLADAGFIKQYGDCLGDIAARDLICAQKFNGLTVLPPLLTDEMIAQYTSALLAGTITSGWTFGAGAALQIPFAMQMAYRFNGIGVTQNVLYENQKLIANQFNSAIGKIQDSLSSTASALGKLQDVVNQNAQALNTLVKQLSSNFGAISSVLNDILSRLDPPEAEVQIDRLITGRLQSLQTYVTQQLIRAAEIRASANLAATKMSECVLGQSKRVDFCGKGYHLMSFPQSAPHGVVFLHVTYVPAQEKNFTTAPAICHDGKAHFPREGVFVSNGTHWFVTQRNFYEPQIITTDNTFVSGNCDVVIGIVNNTVYDPLQSELDSIKEELDKIHKNGSGGSGDIIKLLNEQVNKEMQSSNLYMSMSSWCYTHSLDGAGLFLFDHAAEEYEHAKKLIIFLNENNVPVQLTSISAPEHKFEGLTQIFQKAYEHEQHISESINNIVDHAIKSKDHATFNFLQWYVAEQHEEEVLFKDILDKIELIGNENHGLYLADQYVKGIAKSRKSGS

SEQ ID NO: 232 - protein, 1299 aa, synthetic construct
SSQCVNLTTRTQLPPAYTNSFTRGVYYPDKVFRSSVLHSTQDLFLPFFSNVTWFHAIHVSGTNGTKRFDNPVLPFNDGVYFASTEKSNIIRGWIFGTTLDSKTQSLLIVNNATNVVIKVCEFQFCNDPFLGVYYHKNNKSWMESEFRVYSSANNCTFEYVSQPFLMDLEGKQGNFKNLREFVFKNIDGYFKIYSKHTPINLVRDLPQGFSALEPLVDLPIGINITRFQTLLALHRSYLTPGDSSSGWTAGAAAYYVGYLQPRTFLLKYNENGTITDAVDCALDPLSETKCTLKSFTVEKGIYQTSNFRVQPTESIVRFPNITNLCPFDKVFNATRFPSVYAWERTKISDCVADYTVFYNSTSFSTFNCYGVSPSKLIDLCFTSVYADTFLIRFSEVRQVAPGQTGVIADYNYKLPDDFTGCVIAWNTAKQDVGSYFYRSHRSSKLKPFERDLSSEENGVRTLSTYDFNQYVPLEYQATRVVVLSFELLNAPATVCGPKKSTNLVKNKCVNFNFNGLTGTGVLTESNKKFLPFQQFGRDIADTTDAVRDPQTLEILDITPCSFGGVSVITPGTNTSNQVAVLYQDVNCTEVPVAIHADQLTPTWRVYSTGSNVFQTRAGCLIGAEHVNNSYECDIPIGAGICASYQTQTNSPGSASSVASQSIIAYTMSLGAENSVAYSNNSIAIPTNFTISVTTEILPVSMTKTSVDCTMYICGDSTECSNLLLQYGSFCTQLNRALTGIAVEQDKNTQEVFAQVKQIYKTPPIKDFGGFNFSQILPDPSKPSKRSFIEDLLFNKVTLADAGFIKQYGDCLGDIAARDLICAQKFNGLTVLPPLLTDEMIAQYTSALLAGTITSGWTFGAGAALQIPFAMQMAYRFNGIGVTQNVLYENQKLIANQFNSAIGKIQDSLSSTASALGKLQDVVNQNAQALNTLVKQLSSNFGAISSVLNDILSRLDPPEAEVQIDRLITGRLQSLQTYVTQQLIRAAEIRASANLAATKMSECVLGQSKRVDFCGKGYHLMSFPQSAPHGVVFLHVTYVPAQEKNFTTAPAICHDGKAHFPREGVFVSNGTHWFVTQRNFYEPQIITTDNTFVSGNCDVVIGIVNNTVYDPLQSELDSIKEELDKIHKNGSGGSGDIIKLLNEQVNKEMQSSNLYMSMSSWCYTHSLDGAGLFLFDHAAEEYEHAKKLIIFLNENNVPVQLTSISAPEHKFEGLTQIFQKAYEHEQHISESINNIVDHAIKSKDHATFNFLQWYVAEQHEEEVLFKDILDKIELIGNENHGLYLADQYVKGIAKSRKSGS

SEQ ID NO: 233 - protein, 1299 aa, synthetic construct
SSQCVNLTTRTQLPPAYTNSFTRGVYYPDKVFRSSVLHSTQDLFLPFFSNVTWFHAIHVSGTNGTKRFDNPVLPFNDGVYFASTEKSNIIRGWIFGTTLDSKTQSLLIVNNATNVVIKVCEFQFCNDPFLGVYYHKNNKSWMESEFRVYSSANNCTFEYVSQPFLMDLEGKQGNFKNLREFVFKNIDGYFKIYSKHTPINLVRDLPQGFSALEPLVDLPIGINITRFQTLLALHRSYLTPGDSSSGWTAGAAAYYVGYLQPRTFLLKYNENGTITDAVDCALDPLSETKCTLKSFTVEKGIYQTSNFRVQPTESIVRFPNITNRCPFDKVFNATRFPNVYAWERTKISDCVADYTVLYNSTSFSTFKCYGVSPSKLIDLCFTSVYADTFLIRSSEVRQVAPGETGVIADYNYKLPDDFTGCVIAWNTAKQDQGQYYYRSHRKTKLKPFERDLSSDENGVRTLSTYDFYPSVPVAYQATRVVVLSFELLNAPATVCGPKKSTNLVKNKCVNFNFNGLTGTGVLTESNKKFLPFQQFGRDIADTTDAVRDPQTLEILDITPCSFGGVSVITPGTNTSNQVAVLYQDVNCTEVPVAIHADQLTPTWRVYSTGSNVFQTRAGCLIGAEHVNNSYECDIPIGAGICASYQTQTNSPGSASSVASQSIIAYTMSLGAENSVAYSNNSIAIPTNFTISVTTEILPVSMTKTSVDCTMYICGDSTECSNLLLQYGSFCTQLNRALTGIAVEQDKNTQEVFAQVKQIYKTPPIKDFGGFNFSQILPDPSKPSKRSFIEDLLFNKVTLADAGFIKQYGDCLGDIAARDLICAQKFNGLTVLPPLLTDEMIAQYTSALLAGTITSGWTFGAGAALQIPFAMQMAYRFNGIGVTQNVLYENQKLIANQFNSAIGKIQDSLSSTASALGKLQDVVNQNAQALNTLVKQLSSNFGAISSVLNDILSRLDPPEAEVQIDRLITGRLQSLQTYVTQQLIRAAEIRASANLAATKMSECVLGQSKRVDFCGKGYHLMSFPQSAPHGVVFLHVTYVPAQEKNFTTAPAICHDGKAHFPREGVFVSNGTHWFVTQRNFYEPQIITTDNTFVSGNCDVVIGIVNNTVYDPLQSELDSIKEELDKIHKNGSGGSGDIIKLLNEQVNKEMQSSNLYMSMSSWCYTHSLDGAGLFLFDHAAEEYEHAKKLIIFLNENNVPVQLTSISAPEHKFEGLTQIFQKAYEHEQHISESINNIVDHAIKSKDHATFNFLQWYVAEQHEEEVLFKDILDKIELIGNENHGLYLADQYVKGIAKSRKSGS

SEQ ID NO: 234 - protein, 1299 aa, synthetic construct
SSQCVNLTTRTQLPPAYTNSFTRGVYYPDKVFRSSVLHSTQDLFLPFFSNVTWFHAIHVSGTNGTKRFDNPVLPFNDGVYFASTEKSNIIRGWIFGTTLDSKTQSLLIVNNATNVVIKVCEFQFCNDPFLGVYYHKNNKSWMESEFRVYSSANNCTFEYVSQPFLMDLEGKQGNFKNLREFVFKNIDGYFKIYSKHTPINLVRDLPQGFSALEPLVDLPIGINITRFQTLLALHRSYLTPGDSSSGWTAGAAAYYVGYLQPRTFLLKYNENGTITDAVDCALDPLSETKCTLKSFTVEKGIYQTSNFRVQPTESIVRFPNITNRCPFDKVFNASRFPNVYAWERTKISDCVADYTVLYNSTSFSTFKCYGVSPSKLIDLCFTSVYADTFLIRSSEVRQVAPGETGVIADYNYKLPDDFTGCVIAWNTAKQDQGQYYYRSSRKTKLKPFERDLTSDENGVRTLSTYDFYPNVPIEYQATRVVVLSFELLNAPATVCGPKKSTNLVKNKCVNFNFNGLTGTGVLTESNKKFLPFQQFGRDIADTTDAVRDPQTLEILDITPCSFGGVSVITPGTNTSNQVAVLYQDVNCTEVPVAIHADQLTPTWRVYSTGSNVFQTRAGCLIGAEHVNNSYECDIPIGAGICASYQTQTNSPGSASSVASQSIIAYTMSLGAENSVAYSNNSIAIPTNFTISVTTEILPVSMTKTSVDCTMYICGDSTECSNLLLQYGSFCTQLNRALTGIAVEQDKNTQEVFAQVKQIYKTPPIKDFGGFNFSQILPDPSKPSKRSFIEDLLFNKVTLADAGFIKQYGDCLGDIAARDLICAQKFNGLTVLPPLLTDEMIAQYTSALLAGTITSGWTFGAGAALQIPFAMQMAYRFNGIGVTQNVLYENQKLIANQFNSAIGKIQDSLSSTASALGKLQDVVNQNAQALNTLVKQLSSNFGAISSVLNDILSRLDPPEAEVQIDRLITGRLQSLQTYVTQQLIRAAEIRASANLAATKMSECVLGQSKRVDFCGKGYHLMSFPQSAPHGVVFLHVTYVPAQEKNFTTAPAICHDGKAHFPREGVFVSNGTHWFVTQRNFYEPQIITTDNTFVSGNCDVVIGIVNNTVYDPLQSELDSIKEELDKIHKNGSGGSGDIIKLLNEQVNKEMQSSNLYMSMSSWCYTHSLDGAGLFLFDHAAEEYEHAKKLIIFLNENNVPVQLTSISAPEHKFEGLTQIFQKAYEHEQHISESINNIVDHAIKSKDHATFNFLQWYVAEQHEEEVLFKDILDKIELIGNENHGLYLADQYVKGIAKSRKSGS

SEQ ID NO: 235 - protein, 1314 aa, synthetic construct
SSQCVNLTTRTQLPPAYTNSFTRGVYYPDKVFRSSVLHSTQDLFLPFFSNVTWFHAIHVSGTNGTKRFDNPVLPFNDGVYFASTEKSNIIRGWIFGTTLDSKTQSLLIVNNATNVVIKVCEFQFCNDPFLGVYYHKNNKSWMESEFRVYSSANNCTFEYVSQPFLMDLEGKQGNFKNLREFVFKNIDGYFKIYSKHTPINLVRDLPQGFSALEPLVDLPIGINITRFQTLLALHRSYLTPGDSSSGWTAGAAAYYVGYLQPRTFLLKYNENGTITDAVDCALDPLSETKCTLKSFTVEKGIYQTSNFRVQPTESIVRFPNITNLCPFSQVFNATRFPSVYAWTRERISNCIADYSVLYNSTSFSTFRCYGVSPTKLNDLCFSNVYADSMVVRGDEVRQIAPSQTGVIADYNYKLPDDFTGCVIAWNSKAKDENGQYFYRLFRKSKLLPFQRDVSNVTYGSGKNDGCNPSEADCYWPLLKYGFTSSVSQDYQPYRVVVLSFELLNAPATVCGPKKSTNLVKNKCVNFNFNGLTGTGVLTESNKKFLPFQQFGRDIADTTDAVRDPQTLEILDITPCSFGGVSVITPGTNTSNQVAVLYQDVNCTEVPVAIHADQLTPTWRVYSTGSNVFQTRAGCLIGAEHVNNSYECDIPIGAGICASYQTQTNSPGSASSVASQSIIAYTMSLGAENSVAYSNNSIAIPTNFTISVTTEILPVSMTKTSVDCTMYICGDSTECSNLLLQYGSFCTQLNRALTGIAVEQDKNTQEVFAQVKQIYKTPPIKDFGGFNFSQILPDPSKPSKRSFIEDLLFNKVTLADAGFIKQYGDCLGDIAARDLICAQKFNGLTVLPPLLTDEMIAQYTSALLAGTITSGWTFGAGAALQIPFAMQMAYRFNGIGVTQNVLYENQKLIANQFNSAIGKIQDSLSSTASALGKLQDVVNQNAQALNTLVKQLSSNFGAISSVLNDILSRLDPPEAEVQIDRLITGRLQSLQTYVTQQLIRAAEIRASANLAATKMSECVLGQSKRVDFCGKGYHLMSFPQSAPHGVVFLHVTYVPAQEKNFTTAPAICHDGKAHFPREGVFVSNGTHWFVTQRNFYEPQIITTDNTFVSGNCDVVIGIVNNTVYDPLQSELDSIKEELDKIHKNGSGGSGDIIKLLNEQVNKEMQSSNLYMSMSSWCYTHSLDGAGLFLFDHAAEEYEHAKKLIIFLNENNVPVQLTSISAPEHKFEGLTQIFQKAYEHEQHISESINNIVDHAIKSKDHATFNFLQWYVAEQHEEEVLFKDILDKIELIGNENHGLYLADQYVKGIAKSRKSGS

SEQ ID NO: 236 - protein, 1314 aa, synthetic construct
SSQCVNLTTRTQLPPAYTNSFTRGVYYPDKVFRSSVLHSTQDLFLPFFSNVTWFHAIHVSGTNGTKRFDNPVLPFNDGVYFASTEKSNIIRGWIFGTTLDSKTQSLLIVNNATNVVIKVCEFQFCNDPFLGVYYHKNNKSWMESEFRVYSSANNCTFEYVSQPFLMDLEGKQGNFKNLREFVFKNIDGYFKIYSKHTPINLVRDLPQGFSALEPLVDLPIGINITRFQTLLALHRSYLTPGDSSSGWTAGAAAYYVGYLQPRTFLLKYNENGTITDAVDCALDPLSETKCTLKSFTVEKGIYQTSNFRVQPTESIVRFPNITNLCPFSQVFNATRFPSVYAWTRERISNCIADYSVLYNSTSFSTFRCYGVSPTKLNDLCFSNVYADSMVVRGDEVRQIAPSQTGVIADYNYKLPDDFTGCVIAWNSKAKDENGQYFYRLFRKSKLLPFQRDVSNVTYGSGKNDGCNPSEADCYWPLLKYGFWSSVSQDYQPYRVVVLSFELLNAPATVCGPKKSTNLVKNKCVNFNFNGLTGTGVLTESNKKFLPFQQFGRDIADTTDAVRDPQTLEILDITPCSFGGVSVITPGTNTSNQVAVLYQDVNCTEVPVAIHADQLTPTWRVYSTGSNVFQTRAGCLIGAEHVNNSYECDIPIGAGICASYQTQTNSPGSASSVASQSIIAYTMSLGAENSVAYSNNSIAIPTNFTISVTTEILPVSMTKTSVDCTMYICGDSTECSNLLLQYGSFCTQLNRALTGIAVEQDKNTQEVFAQVKQIYKTPPIKDFGGFNFSQILPDPSKPSKRSFIEDLLFNKVTLADAGFIKQYGDCLGDIAARDLICAQKFNGLTVLPPLLTDEMIAQYTSALLAGTITSGWTFGAGAALQIPFAMQMAYRFNGIGVTQNVLYENQKLIANQFNSAIGKIQDSLSSTASALGKLQDVVNQNAQALNTLVKQLSSNFGAISSVLNDILSRLDPPEAEVQIDRLITGRLQSLQTYVTQQLIRAAEIRASANLAATKMSECVLGQSKRVDFCGKGYHLMSFPQSAPHGVVFLHVTYVPAQEKNFTTAPAICHDGKAHFPREGVFVSNGTHWFVTQRNFYEPQIITTDNTFVSGNCDVVIGIVNNTVYDPLQSELDSIKEELDKIHKNGSGGSGDIIKLLNEQVNKEMQSSNLYMSMSSWCYTHSLDGAGLFLFDHAAEEYEHAKKLIIFLNENNVPVQLTSISAPEHKFEGLTQIFQKAYEHEQHISESINNIVDHAIKSKDHATFNFLQWYVAEQHEEEVLFKDILDKIELIGNENHGLYLADQYVKGIAKSRKSGS

SEQ ID NO: 237 - protein, 1314 aa, synthetic construct
SSQCVNLTTRTQLPPAYTNSFTRGVYYPDKVFRSSVLHSTQDLFLPFFSNVTWFHAIHVSGTNGTKRFDNPVLPFNDGVYFASTEKSNIIRGWIFGTTLDSKTQSLLIVNNATNVVIKVCEFQFCNDPFLGVYYHKNNKSWMESEFRVYSSANNCTFEYVSQPFLMDLEGKQGNFKNLREFVFKNIDGYFKIYSKHTPINLVRDLPQGFSALEPLVDLPIGINITRFQTLLALHRSYLTPGDSSSGWTAGAAAYYVGYLQPRTFLLKYNENGTITDAVDCALDPLSETKCTLKSFTVEKGIYQTSNFRVQPTESIVRFPNITNLCPFSQVFNATRFPSVYAWTRERISNCIADYSVLYNSTSFSTFRCYGVSPTKLNDLCFSNVYADSMVVRGDEVRQIAPSQTGVIADYNYKLPDDFTGCVIAWNSKAKDENGQYFYRLFRKSKLLPFQRDVSNVTYGSGKNDGCNPSEADCYWPLYKYGFWSSVSQDYQPYRVVVLSFELLNAPATVCGPKKSTNLVKNKCVNFNFNGLTGTGVLTESNKKFLPFQQFGRDIADTTDAVRDPQTLEILDITPCSFGGVSVITPGTNTSNQVAVLYQDVNCTEVPVAIHADQLTPTWRVYSTGSNVFQTRAGCLIGAEHVNNSYECDIPIGAGICASYQTQTNSPGSASSVASQSIIAYTMSLGAENSVAYSNNSIAIPTNFTISVTTEILPVSMTKTSVDCTMYICGDSTECSNLLLQYGSFCTQLNRALTGIAVEQDKNTQEVFAQVKQIYKTPPIKDFGGFNFSQILPDPSKPSKRSFIEDLLFNKVTLADAGFIKQYGDCLGDIAARDLICAQKFNGLTVLPPLLTDEMIAQYTSALLAGTITSGWTFGAGAALQIPFAMQMAYRFNGIGVTQNVLYENQKLIANQFNSAIGKIQDSLSSTASALGKLQDVVNQNAQALNTLVKQLSSNFGAISSVLNDILSRLDPPEAEVQIDRLITGRLQSLQTYVTQQLIRAAEIRASANLAATKMSECVLGQSKRVDFCGKGYHLMSFPQSAPHGVVFLHVTYVPAQEKNFTTAPAICHDGKAHFPREGVFVSNGTHWFVTQRNFYEPQIITTDNTFVSGNCDVVIGIVNNTVYDPLQSELDSIKEELDKIHKNGSGGSGDIIKLLNEQVNKEMQSSNLYMSMSSWCYTHSLDGAGLFLFDHAAEEYEHAKKLIIFLNENNVPVQLTSISAPEHKFEGLTQIFQKAYEHEQHISESINNIVDHAIKSKDHATFNFLQWYVAEQHEEEVLFKDILDKIELIGNENHGLYLADQYVKGIAKSRKSGS

SEQ ID NO: 238 - protein, 1315 aa, synthetic construct
SSQCVNLTTRTQLPPAYTNSFTRGVYYPDKVFRSSVLHSTQDLFLPFFSNVTWFHAIHVSGTNGTKRFDNPVLPFNDGVYFASTEKSNIIRGWIFGTTLDSKTQSLLIVNNATNVVIKVCEFQFCNDPFLGVYYHKNNKSWMESEFRVYSSANNCTFEYVSQPFLMDLEGKQGNFKNLREFVFKNIDGYFKIYSKHTPINLVRDLPQGFSALEPLVDLPIGINITRFQTLLALHRSYLTPGDSSSGWTAGAAAYYVGYLQPRTFLLKYNENGTITDAVDCALDPLSETKCTLKSFTVEKGIYQTSNFRVQPTESIVRFPNMTNICPFDQVFNKTQFPSVYAWERVRISDCVSDYTVLYNSSASFSTFKCYGVSPTKLNDLCFSGVYADYFVVKGDHVHQIAPGQTGVIADYNYKLPSEFVGCILAWNTRTIDSKRGFYYRLFRHGNIRPYERDTSNVPYNAAGGTCNQPGTHNCYEPLQDYGFTSTSGVGYQPFRVVVLSFELLNAPATVCGPKKSTNLVKNKCVNFNFNGLTGTGVLTESNKKFLPFQQFGRDIADTTDAVRDPQTLEILDITPCSFGGVSVITPGTNTSNQVAVLYQDVNCTEVPVAIHADQLTPTWRVYSTGSNVFQTRAGCLIGAEHVNNSYECDIPIGAGICASYQTQTNSPGSASSVASQSIIAYTMSLGAENSVAYSNNSIAIPTNFTISVTTEILPVSMTKTSVDCTMYICGDSTECSNLLLQYGSFCTQLNRALTGIAVEQDKNTQEVFAQVKQIYKTPPIKDFGGFNFSQILPDPSKPSKRSFIEDLLFNKVTLADAGFIKQYGDCLGDIAARDLICAQKFNGLTVLPPLLTDEMIAQYTSALLAGTITSGWTFGAGAALQIPFAMQMAYRFNGIGVTQNVLYENQKLIANQFNSAIGKIQDSLSSTASALGKLQDVVNQNAQALNTLVKQLSSNFGAISSVLNDILSRLDPPEAEVQIDRLITGRLQSLQTYVTQQLIRAAEIRASANLAATKMSECVLGQSKRVDFCGKGYHLMSFPQSAPHGVVFLHVTYVPAQEKNFTTAPAICHDGKAHFPREGVFVSNGTHWFVTQRNFYEPQIITTDNTFVSGNCDVVIGIVNNTVYDPLQSELDSIKEELDKIHKNGSGGSGDIIKLLNEQVNKEMQSSNLYMSMSSWCYTHSLDGAGLFLFDHAAEEYEHAKKLIIFLNENNVPVQLTSISAPEHKFEGLTQIFQKAYEHEQHISESINNIVDHAIKSKDHATFNFLQWYVAEQHEEEVLFKDILDKIELIGNENHGLYLADQYVKGIAKSRKSGS

SEQ ID NO: 239 - protein, 1315 aa, synthetic construct
SSQCVNLTTRTQLPPAYTNSFTRGVYYPDKVFRSSVLHSTQDLFLPFFSNVTWFHAIHVSGTNGTKRFDNPVLPFNDGVYFASTEKSNIIRGWIFGTTLDSKTQSLLIVNNATNVVIKVCEFQFCNDPFLGVYYHKNNKSWMESEFRVYSSANNCTFEYVSQPFLMDLEGKQGNFKNLREFVFKNIDGYFKIYSKHTPINLVRDLPQGFSALEPLVDLPIGINITRFQTLLALHRSYLTPGDSSSGWTAGAAAYYVGYLQPRTFLLKYNENGTITDAVDCALDPLSETKCTLKSFTVEKGIYQTSNFRVQPTESIVRFPNMTNICPFDQVFNKTQFPSVYAWERVRISDCVSDYTVLYNSSASFSTFKCYGVSPTKLNDLCFSGVYADYFVVKGDHVHQIAPGQTGVIADYNYKLPSEFVGCILAWNTRTIDSKRGFYYRLFRHGNIRPYERDTSNVPYNAAGGTCNQPGTHNCYEPLQDYGFWSTSGVGYQPFRVVVLSFELLNAPATVCGPKKSTNLVKNKCVNFNFNGLTGTGVLTESNKKFLPFQQFGRDIADTTDAVRDPQTLEILDITPCSFGGVSVITPGTNTSNQVAVLYQDVNCTEVPVAIHADQLTPTWRVYSTGSNVFQTRAGCLIGAEHVNNSYECDIPIGAGICASYQTQTNSPGSASSVASQSIIAYTMSLGAENSVAYSNNSIAIPTNFTISVTTEILPVSMTKTSVDCTMYICGDSTECSNLLLQYGSFCTQLNRALTGIAVEQDKNTQEVFAQVKQIYKTPPIKDFGGFNFSQILPDPSKPSKRSFIEDLLFNKVTLADAGFIKQYGDCLGDIAARDLICAQKFNGLTVLPPLLTDEMIAQYTSALLAGTITSGWTFGAGAALQIPFAMQMAYRFNGIGVTQNVLYENQKLIANQFNSAIGKIQDSLSSTASALGKLQDVVNQNAQALNTLVKQLSSNFGAISSVLNDILSRLDPPEAEVQIDRLITGRLQSLQTYVTQQLIRAAEIRASANLAATKMSECVLGQSKRVDFCGKGYHLMSFPQSAPHGVVFLHVTYVPAQEKNFTTAPAICHDGKAHFPREGVFVSNGTHWFVTQRNFYEPQIITTDNTFVSGNCDVVIGIVNNTVYDPLQSELDSIKEELDKIHKNGSGGSGDIIKLLNEQVNKEMQSSNLYMSMSSWCYTHSLDGAGLFLFDHAAEEYEHAKKLIIFLNENNVPVQLTSISAPEHKFEGLTQIFQKAYEHEQHISESINNIVDHAIKSKDHATFNFLQWYVAEQHEEEVLFKDILDKIELIGNENHGLYLADQYVKGIAKSRKSGS

SEQ ID NO: 240 - protein, 1315 aa, synthetic construct
SSQCVNLTTRTQLPPAYTNSFTRGVYYPDKVFRSSVLHSTQDLFLPFFSNVTWFHAIHVSGTNGTKRFDNPVLPFNDGVYFASTEKSNIIRGWIFGTTLDSKTQSLLIVNNATNVVIKVCEFQFCNDPFLGVYYHKNNKSWMESEFRVYSSANNCTFEYVSQPFLMDLEGKQGNFKNLREFVFKNIDGYFKIYSKHTPINLVRDLPQGFSALEPLVDLPIGINITRFQTLLALHRSYLTPGDSSSGWTAGAAAYYVGYLQPRTFLLKYNENGTITDAVDCALDPLSETKCTLKSFTVEKGIYQTSNFRVQPTESIVRFPNMTNICPFDQVFNKTQFPSVYAWERVRISDCVSDYTVLYNSSASFSTFKCYGVSPTKLNDLCFSGVYADYFVVKGDHVHQIAPGQTGVIADYNYKLPSEFVGCILAWNTRTIDSKRGFYYRLFRHGNIRPYERDTSNVPYNAAGGTCNQPGTHNCYEPLYDYGFWSTSGVGYQPFRVVVLSFELLNAPATVCGPKKSTNLVKNKCVNFNFNGLTGTGVLTESNKKFLPFQQFGRDIADTTDAVRDPQTLEILDITPCSFGGVSVITPGTNTSNQVAVLYQDVNCTEVPVAIHADQLTPTWRVYSTGSNVFQTRAGCLIGAEHVNNSYECDIPIGAGICASYQTQTNSPGSASSVASQSIIAYTMSLGAENSVAYSNNSIAIPTNFTISVTTEILPVSMTKTSVDCTMYICGDSTECSNLLLQYGSFCTQLNRALTGIAVEQDKNTQEVFAQVKQIYKTPPIKDFGGFNFSQILPDPSKPSKRSFIEDLLFNKVTLADAGFIKQYGDCLGDIAARDLICAQKFNGLTVLPPLLTDEMIAQYTSALLAGTITSGWTFGAGAALQIPFAMQMAYRFNGIGVTQNVLYENQKLIANQFNSAIGKIQDSLSSTASALGKLQDVVNQNAQALNTLVKQLSSNFGAISSVLNDILSRLDPPEAEVQIDRLITGRLQSLQTYVTQQLIRAAEIRASANLAATKMSECVLGQSKRVDFCGKGYHLMSFPQSAPHGVVFLHVTYVPAQEKNFTTAPAICHDGKAHFPREGVFVSNGTHWFVTQRNFYEPQIITTDNTFVSGNCDVVIGIVNNTVYDPLQSELDSIKEELDKIHKNGSGGSGDIIKLLNEQVNKEMQSSNLYMSMSSWCYTHSLDGAGLFLFDHAAEEYEHAKKLIIFLNENNVPVQLTSISAPEHKFEGLTQIFQKAYEHEQHISESINNIVDHAIKSKDHATFNFLQWYVAEQHEEEVLFKDILDKIELIGNENHGLYLADQYVKGIAKSRKSGS

SEQ ID NO: 241 - protein, 1317 aa, synthetic construct
SSQCVNLTTRTQLPPAYTNSFTRGVYYPDKVFRSSVLHSTQDLFLPFFSNVTWFHAIHVSGTNGTKRFDNPVLPFNDGVYFASTEKSNIIRGWIFGTTLDSKTQSLLIVNNATNVVIKVCEFQFCNDPFLGVYYHKNNKSWMESEFRVYSSANNCTFEYVSQPFLMDLEGKQGNFKNLREFVFKNIDGYFKIYSKHTPINLVRDLPQGFSALEPLVDLPIGINITRFQTLLALHRSYLTPGDSSSGWTAGAAAYYVGYLQPRTFLLKYNENGTITDAVDCALDPLSETKCTLKSFTVEKGIYQTSNFRVQPTESIVRFPNITNLCPFGQVFNASNFPSVYAWERLRISDCVADYAVLYNSSSSFSTFKCYGVSPTKLNDLCFSSVYADYFVVKGDDVRQIAPAQTGVIADYNYKLPDDFTGCVLAWNTNSVDSKSGNNFYYRLFRHGKIKPYERDISNVLYNSAGGTCSSISQLGCYEPLKSYGFTPTVGVGYQPYRVVVLSFELLNAPATVCGPKKSTNLVKNKCVNFNFNGLTGTGVLTESNKKFLPFQQFGRDIADTTDAVRDPQTLEILDITPCSFGGVSVITPGTNTSNQVAVLYQDVNCTEVPVAIHADQLTPTWRVYSTGSNVFQTRAGCLIGAEHVNNSYECDIPIGAGICASYQTQTNSPGSASSVASQSIIAYTMSLGAENSVAYSNNSIAIPTNFTISVTTEILPVSMTKTSVDCTMYICGDSTECSNLLLQYGSFCTQLNRALTGIAVEQDKNTQEVFAQVKQIYKTPPIKDFGGFNFSQILPDPSKPSKRSFIEDLLFNKVTLADAGFIKQYGDCLGDIAARDLICAQKFNGLTVLPPLLTDEMIAQYTSALLAGTITSGWTFGAGAALQIPFAMQMAYRFNGIGVTQNVLYENQKLIANQFNSAIGKIQDSLSSTASALGKLQDVVNQNAQALNTLVKQLSSNFGAISSVLNDILSRLDPPEAEVQIDRLITGRLQSLQTYVTQQLIRAAEIRASANLAATKMSECVLGQSKRVDFCGKGYHLMSFPQSAPHGVVFLHVTYVPAQEKNFTTAPAICHDGKAHFPREGVFVSNGTHWFVTQRNFYEPQIITTDNTFVSGNCDVVIGIVNNTVYDPLQSELDSIKEELDKIHKNGSGGSGDIIKLLNEQVNKEMQSSNLYMSMSSWCYTHSLDGAGLFLFDHAAEEYEHAKKLIIFLNENNVPVQLTSISAPEHKFEGLTQIFQKAYEHEQHISESINNIVDHAIKSKDHATFNFLQWYVAEQHEEEVLFKDILDKIELIGNENHGLYLADQYVKGIAKSRKSGS

SEQ ID NO: 242 - protein, 1317 aa, synthetic construct
SSQCVNLTTRTQLPPAYTNSFTRGVYYPDKVFRSSVLHSTQDLFLPFFSNVTWFHAIHVSGTNGTKRFDNPVLPFNDGVYFASTEKSNIIRGWIFGTTLDSKTQSLLIVNNATNVVIKVCEFQFCNDPFLGVYYHKNNKSWMESEFRVYSSANNCTFEYVSQPFLMDLEGKQGNFKNLREFVFKNIDGYFKIYSKHTPINLVRDLPQGFSALEPLVDLPIGINITRFQTLLALHRSYLTPGDSSSGWTAGAAAYYVGYLQPRTFLLKYNENGTITDAVDCALDPLSETKCTLKSFTVEKGIYQTSNFRVQPTESIVRFPNITNLCPFGQVFNASNFPSVYAWERLRISDCVADYAVLYNSSSSFSTFKCYGVSPTKLNDLCFSSVYADYFVVKGDDVRQIAPAQTGVIADYNYKLPDDFTGCVLAWNTNSVDSKSGNNFYYRLFRHGKIKPYERDISNVLYNSAGGTCSSISQLGCYEPLKSYGFWPTVGVGYQPYRVVVLSFELLNAPATVCGPKKSTNLVKNKCVNFNFNGLTGTGVLTESNKKFLPFQQFGRDIADTTDAVRDPQTLEILDITPCSFGGVSVITPGTNTSNQVAVLYQDVNCTEVPVAIHADQLTPTWRVYSTGSNVFQTRAGCLIGAEHVNNSYECDIPIGAGICASYQTQTNSPGSASSVASQSIIAYTMSLGAENSVAYSNNSIAIPTNFTISVTTEILPVSMTKTSVDCTMYICGDSTECSNLLLQYGSFCTQLNRALTGIAVEQDKNTQEVFAQVKQIYKTPPIKDFGGFNFSQILPDPSKPSKRSFIEDLLFNKVTLADAGFIKQYGDCLGDIAARDLICAQKFNGLTVLPPLLTDEMIAQYTSALLAGTITSGWTFGAGAALQIPFAMQMAYRFNGIGVTQNVLYENQKLIANQFNSAIGKIQDSLSSTASALGKLQDVVNQNAQALNTLVKQLSSNFGAISSVLNDILSRLDPPEAEVQIDRLITGRLQSLQTYVTQQLIRAAEIRASANLAATKMSECVLGQSKRVDFCGKGYHLMSFPQSAPHGVVFLHVTYVPAQEKNFTTAPAICHDGKAHFPREGVFVSNGTHWFVTQRNFYEPQIITTDNTFVSGNCDVVIGIVNNTVYDPLQSELDSIKEELDKIHKNGSGGSGDIIKLLNEQVNKEMQSSNLYMSMSSWCYTHSLDGAGLFLFDHAAEEYEHAKKLIIFLNENNVPVQLTSISAPEHKFEGLTQIFQKAYEHEQHISESINNIVDHAIKSKDHATFNFLQWYVAEQHEEEVLFKDILDKIELIGNENHGLYLADQYVKGIAKSRKSGS

SEQ ID NO: 243 - protein, 1317 aa, synthetic construct
SSQCVNLTTRTQLPPAYTNSFTRGVYYPDKVFRSSVLHSTQDLFLPFFSNVTWFHAIHVSGTNGTKRFDNPVLPFNDGVYFASTEKSNIIRGWIFGTTLDSKTQSLLIVNNATNVVIKVCEFQFCNDPFLGVYYHKNNKSWMESEFRVYSSANNCTFEYVSQPFLMDLEGKQGNFKNLREFVFKNIDGYFKIYSKHTPINLVRDLPQGFSALEPLVDLPIGINITRFQTLLALHRSYLTPGDSSSGWTAGAAAYYVGYLQPRTFLLKYNENGTITDAVDCALDPLSETKCTLKSFTVEKGIYQTSNFRVQPTESIVRFPNITNLCPFGQVFNASNFPSVYAWERLRISDCVADYAVLYNSSSSFSTFKCYGVSPTKLNDLCFSSVYADYFVVKGDDVRQIAPAQTGVIADYNYKLPDDFTGCVLAWNTNSVDSKSGNNFYYRLFRHGKIKPYERDISNVLYNSAGGTCSSISQLGCYEPLYSYGFWPTVGVGYQPYRVVVLSFELLNAPATVCGPKKSTNLVKNKCVNFNFNGLTGTGVLTESNKKFLPFQQFGRDIADTTDAVRDPQTLEILDITPCSFGGVSVITPGTNTSNQVAVLYQDVNCTEVPVAIHADQLTPTWRVYSTGSNVFQTRAGCLIGAEHVNNSYECDIPIGAGICASYQTQTNSPGSASSVASQSIIAYTMSLGAENSVAYSNNSIAIPTNFTISVTTEILPVSMTKTSVDCTMYICGDSTECSNLLLQYGSFCTQLNRALTGIAVEQDKNTQEVFAQVKQIYKTPPIKDFGGFNFSQILPDPSKPSKRSFIEDLLFNKVTLADAGFIKQYGDCLGDIAARDLICAQKFNGLTVLPPLLTDEMIAQYTSALLAGTITSGWTFGAGAALQIPFAMQMAYRFNGIGVTQNVLYENQKLIANQFNSAIGKIQDSLSSTASALGKLQDVVNQNAQALNTLVKQLSSNFGAISSVLNDILSRLDPPEAEVQIDRLITGRLQSLQTYVTQQLIRAAEIRASANLAATKMSECVLGQSKRVDFCGKGYHLMSFPQSAPHGVVFLHVTYVPAQEKNFTTAPAICHDGKAHFPREGVFVSNGTHWFVTQRNFYEPQIITTDNTFVSGNCDVVIGIVNNTVYDPLQSELDSIKEELDKIHKNGSGGSGDIIKLLNEQVNKEMQSSNLYMSMSSWCYTHSLDGAGLFLFDHAAEEYEHAKKLIIFLNENNVPVQLTSISAPEHKFEGLTQIFQKAYEHEQHISESINNIVDHAIKSKDHATFNFLQWYVAEQHEEEVLFKDILDKIELIGNENHGLYLADQYVKGIAKSRKSGS

SEQ ID NO: 244 - protein, 1314 aa, synthetic construct
SSQCVNLTTRTQLPPAYTNSFTRGVYYPDKVFRSSVLHSTQDLFLPFFSNVTWFHAIHVSGTNGTKRFDNPVLPFNDGVYFASTEKSNIIRGWIFGTTLDSKTQSLLIVNNATNVVIKVCEFQFCNDPFLGVYYHKNNKSWMESEFRVYSSANNCTFEYVSQPFLMDLEGKQGNFKNLREFVFKNIDGYFKIYSKHTPINLVRDLPQGFSALEPLVDLPIGINITRFQTLLALHRSYLTPGDSSSGWTAGAAAYYVGYLQPRTFLLKYNENGTITDAVDCALDPLSETKCTLKSFTVEKGIYQTSNFRVQPTESIVRFPNITNLCPFSQVFNATRFPSVYAWTRERISNCIADYSVLYNSTSFSTFRCYGVSPTKLNDLCFSNVYADSMVVRGDEVRQIAPSQTGVIADYNYKLPDDFTGCVIAWNSKAKDENGQYFYRLFRKSKLLPFQRDVSNVTYGSGKNDGCNPSEADCYWPLLKYGFTGSVSQDYQPYRVVVLSFELLNAPATVCGPKKSTNLVKNKCVNFNFNGLTGTGVLTESNKKFLPFQQFGRDIADTTDAVRDPQTLEILDITPCSFGGVSVITPGTNTSNQVAVLYQDVNCTEVPVAIHADQLTPTWRVYSTGSNVFQTRAGCLIGAEHVNNSYECDIPIGAGICASYQTQTNSPGSASSVASQSIIAYTMSLGAENSVAYSNNSIAIPTNFTISVTTEILPVSMTKTSVDCTMYICGDSTECSNLLLQYGSFCTQLNRALTGIAVEQDKNTQEVFAQVKQIYKTPPIKDFGGFNFSQILPDPSKPSKRSFIEDLLFNKVTLADAGFIKQYGDCLGDIAARDLICAQKFNGLTVLPPLLTDEMIAQYTSALLAGTITSGWTFGAGAALQIPFAMQMAYRFNGIGVTQNVLYENQKLIANQFNSAIGKIQDSLSSTASALGKLQDVVNQNAQALNTLVKQLSSNFGAISSVLNDILSRLDPPEAEVQIDRLITGRLQSLQTYVTQQLIRAAEIRASANLAATKMSECVLGQSKRVDFCGKGYHLMSFPQSAPHGVVFLHVTYVPAQEKNFTTAPAICHDGKAHFPREGVFVSNGTHWFVTQRNFYEPQIITTDNTFVSGNCDVVIGIVNNTVYDPLQSELDSIKEELDKIHKNGSGGSGDIIKLLNEQVNKEMQSSNLYMSMSSWCYTHSLDGAGLFLFDHAAEEYEHAKKLIIFLNENNVPVQLTSISAPEHKFEGLTQIFQKAYEHEQHISESINNIVDHAIKSKDHATFNFLQWYVAEQHEEEVLFKDILDKIELIGNENHGLYLADQYVKGIAKSRKSGS

SEQ ID NO: 245 - protein, 1300 aa, synthetic construct
SSQCVNLTTRTQLPPAYTNSFTRGVYYPDKVFRSSVLHSTQDLFLPFFSNVTWFHAIHVSGTNGTKRFDNPVLPFNDGVYFASTEKSNIIRGWIFGTTLDSKTQSLLIVNNATNVVIKVCEFQFCNDPFLGVYYHKNNKSWMESEFRVYSSANNCTFEYVSQPFLMDLEGKQGNFKNLREFVFKNIDGYFKIYSKHTPINLVRDLPQGFSALEPLVDLPIGINITRFQTLLALHRSYLTPGDSSSGWTAGAAAYYVGYLQPRTFLLKYNENGTITDAVDCALDPLSETKCTLKSFTVEKGIYQTSNFRVQPTESIVRFPNITNRCPFDKVFNATRFPNVYAWERTKISDCVADYTVLYNSTSFSTFKCYGVSPSKLIDLCFTSVYADTFLIRSSEVRQVAPGETGVIADYNYKLPDDFTGCVIAWNTAKHDTGNYYYRSHRKTKLKPFERDLSSDDGNGVYTLSTYDFNPNVPVAYQATRVVVLSFELLNAPATVCGPKKSTNLVKNKCVNFNFNGLTGTGVLTESNKKFLPFQQFGRDIADTTDAVRDPQTLEILDITPCSFGGVSVITPGTNTSNQVAVLYQDVNCTEVPVAIHADQLTPTWRVYSTGSNVFQTRAGCLIGAEHVNNSYECDIPIGAGICASYQTQTNSPGSASSVASQSIIAYTMSLGAENSVAYSNNSIAIPTNFTISVTTEILPVSMTKTSVDCTMYICGDSTECSNLLLQYGSFCTQLNRALTGIAVEQDKNTQEVFAQVKQIYKTPPIKDFGGFNFSQILPDPSKPSKRSFIEDLLFNKVTLADAGFIKQYGDCLGDIAARDLICAQKFNGLTVLPPLLTDEMIAQYTSALLAGTITSGWTFGAGAALQIPFAMQMAYRFNGIGVTQNVLYENQKLIANQFNSAIGKIQDSLSSTASALGKLQDVVNQNAQALNTLVKQLSSNFGAISSVLNDILSRLDPPEAEVQIDRLITGRLQSLQTYVTQQLIRAAEIRASANLAATKMSECVLGQSKRVDFCGKGYHLMSFPQSAPHGVVFLHVTYVPAQEKNFTTAPAICHDGKAHFPREGVFVSNGTHWFVTQRNFYEPQIITTDNTFVSGNCDVVIGIVNNTVYDPLQSELDSIKEELDKIHKNGSGGSGDIIKLLNEQVNKEMQSSNLYMSMSSWCYTHSLDGAGLFLFDHAAEEYEHAKKLIIFLNENNVPVQLTSISAPEHKFEGLTQIFQKAYEHEQHISESINNIVDHAIKSKDHATFNFLQWYVAEQHEEEVLFKDILDKIELIGNENHGLYLADQYVKGIAKSRKSGS

SEQ ID NO: 246 - protein, 1315 aa, synthetic construct
SSQCVNLTTRTQLPPAYTNSFTRGVYYPDKVFRSSVLHSTQDLFLPFFSNVTWFHAIHVSGTNGTKRFDNPVLPFNDGVYFASTEKSNIIRGWIFGTTLDSKTQSLLIVNNATNVVIKVCEFQFCNDPFLGVYYHKNNKSWMESEFRVYSSANNCTFEYVSQPFLMDLEGKQGNFKNLREFVFKNIDGYFKIYSKHTPINLVRDLPQGFSALEPLVDLPIGINITRFQTLLALHRSYLTPGDSSSGWTAGAAAYYVGYLQPRTFLLKYNENGTITDAVDCALDPLSETKCTLKSFTVEKGIYQTSNFRVQPTESIVRFPNVTQLCPFSDVFNRTMFPSVYAWERMSIRDCVADYAVLYNSSISFSTFECYGVSPTKLNDLCFSSVYADYFVVRGDDVKQIAPGKTGVIADYNYKLPDDFVGCVLAWNSRHVDNKQGFYYRLFRHGKIKPYQRDMSRELYSPSGTPCTVVGFNCYDPLAHYAFASPGIGIGYQPFRVVVLSFQLLNAPATVCGPKKSTNLVKNKCVNFNFNGLTGTGVLTESNKKFLPFQQFGRDIADTTDAVRDPQTLEILDITPCSFGGVSVITPGTNTSNQVAVLYQDVNCTEVPVAIHADQLTPTWRVYSTGSNVFQTRAGCLIGAEHVNNSYECDIPIGAGICASYQTQTNSPGSASSVASQSIIAYTMSLGAENSVAYSNNSIAIPTNFTISVTTEILPVSMTKTSVDCTMYICGDSTECSNLLLQYGSFCTQLNRALTGIAVEQDKNTQEVFAQVKQIYKTPPIKDFGGFNFSQILPDPSKPSKRSFIEDLLFNKVTLADAGFIKQYGDCLGDIAARDLICAQKFNGLTVLPPLLTDEMIAQYTSALLAGTITSGWTFGAGAALQIPFAMQMAYRFNGIGVTQNVLYENQKLIANQFNSAIGKIQDSLSSTASALGKLQDVVNQNAQALNTLVKQLSSNFGAISSVLNDILSRLDPPEAEVQIDRLITGRLQSLQTYVTQQLIRAAEIRASANLAATKMSECVLGQSKRVDFCGKGYHLMSFPQSAPHGVVFLHVTYVPAQEKNFTTAPAICHDGKAHFPREGVFVSNGTHWFVTQRNFYEPQIITTDNTFVSGNCDVVIGIVNNTVYDPLQSELDSIKEELDKIHKNGSGGSGDIIKLLNEQVNKEMQSSNLYMSMSSWCYTHSLDGAGLFLFDHAAEEYEHAKKLIIFLNENNVPVQLTSISAPEHKFEGLTQIFQKAYEHEQHISESINNIVDHAIKSKDHATFNFLQWYVAEQHEEEVLFKDILDKIELIGNENHGLYLADQYVKGIAKSRKSGS

SEQ ID NO: 247 - protein, 1317 aa, synthetic construct
SSQCVNLTTRTQLPPAYTNSFTRGVYYPDKVFRSSVLHSTQDLFLPFFSNVTWFHAIHVSGTNGTKRFDNPVLPFNDGVYFASTEKSNIIRGWIFGTTLDSKTQSLLIVNNATNVVIKVCEFQFCNDPFLGVYYHKNNKSWMESEFRVYSSANNCTFEYVSQPFLMDLEGKQGNFKNLREFVFKNIDGYFKIYSKHTPINLVRDLPQGFSALEPLVDLPIGINITRFQTLLALHRSYLTPGDSSSGWTAGAAAYYVGYLQPRTFLLKYNENGTITDAVDCALDPLSETKCTLKSFTVEKGIYQTSNFRVQPTESIVRFPNITNLCPFDEVFNATRFPSVYAWERKKISNCVADYSVLYNSTSFSTFKCYGVSPSKLNDLCFTSVYADSFVIRGDEVRQIAPGQTGVIADYNYKLPDDFTGCVIAWNTANQDSGEGGNPNYYYRSSRKSKLKPFERDLSSDEYNVGSQPCNRMGPNCYRTLSTYDFYPTVGVGYQPYRVVVLSFELLNAPATVCGPKKSTNLVKNKCVNFNFNGLTGTGVLTESNKKFLPFQQFGRDIADTTDAVRDPQTLEILDITPCSFGGVSVITPGTNTSNQVAVLYQDVNCTEVPVAIHADQLTPTWRVYSTGSNVFQTRAGCLIGAEHVNNSYECDIPIGAGICASYQTQTNSPGSASSVASQSIIAYTMSLGAENSVAYSNNSIAIPTNFTISVTTEILPVSMTKTSVDCTMYICGDSTECSNLLLQYGSFCTQLNRALTGIAVEQDKNTQEVFAQVKQIYKTPPIKDFGGFNFSQILPDPSKPSKRSFIEDLLFNKVTLADAGFIKQYGDCLGDIAARDLICAQKFNGLTVLPPLLTDEMIAQYTSALLAGTITSGWTFGAGAALQIPFAMQMAYRFNGIGVTQNVLYENQKLIANQFNSAIGKIQDSLSSTASALGKLQDVVNQNAQALNTLVKQLSSNFGAISSVLNDILSRLDPPEAEVQIDRLITGRLQSLQTYVTQQLIRAAEIRASANLAATKMSECVLGQSKRVDFCGKGYHLMSFPQSAPHGVVFLHVTYVPAQEKNFTTAPAICHDGKAHFPREGVFVSNGTHWFVTQRNFYEPQIITTDNTFVSGNCDVVIGIVNNTVYDPLQSELDSIKEELDKIHKNGSGGSGDIIKLLNEQVNKEMQSSNLYMSMSSWCYTHSLDGAGLFLFDHAAEEYEHAKKLIIFLNENNVPVQLTSISAPEHKFEGLTQIFQKAYEHEQHISESINNIVDHAIKSKDHATFNFLQWYVAEQHEEEVLFKDILDKIELIGNENHGLYLADQYVKGIAKSRKSGS

SEQ ID NO: 248 - protein, 1404 aa, synthetic construct
SSQCVNLTTRTQLPPAYTNSFTRGVYYPDKVFRSSVLHSTQDLFLPFFSNVTWFHAIHVSGTNGTKRFDNPVLPFNDGVYFASTEKSNIIRGWIFGTTLDSKTQSLLIVNNATNVVIKVCEFQFCNDPFLGVYYHKNNKSWMESEFRVYSSANNCTFEYVSQPFLMDLEGKQGNFKNLREFVFKNIDGYFKIYSKHTPINLVRDLPQGFSALEPLVDLPIGINITRFQTLLALHRSYLTPGDSSSGWTAGAAAYYVGYLQPRTFLLKYNENGTITDAVDCALDPLSETKCTLKSFTVEKGIYQTSNFRVQPTESIVRFPNLPDCNIEEWLTAKSVPSPLNWERKTFSNCNFNLSSLLRFVQADSFSCNNIDASKVYGMCFGSISVDKFAIPNSRQVDLQLGNSGFLQSFNYKIDTTATSCQLYYSLPANNVTINNYNPSSWNRRYGFNDDTVFKPRPAGVLTNHDVVYSQQCFKVPNTFCPCKNNGSCVSSGKGTTNGSGTCPAGTNYRTCENTTWCACSCTPDPITASGPRKCPQKKSLVGVGEHCSGLGVDSDYCGNVSCLCSTDAFLGWSADSCLVNDRCNIFANIILNGINSGTTCSTKKSTNLVKNKCVNFNFNGLTGTGVLTESNKKFLPFQQFGRDIADTTDAVRDPQTLEILDITPCSFGGVSVITPGTNTSNQVAVLYQDVNCTEVPVAIHADQLTPTWRVYSTGSNVFQTRAGCLIGAEHVNNSYECDIPIGAGICASYQTQTNSPGSASSVASQSIIAYTMSLGAENSVAYSNNSIAIPTNFTISVTTEILPVSMTKTSVDCTMYICGDSTECSNLLLQYGSFCTQLNRALTGIAVEQDKNTQEVFAQVKQIYKTPPIKDFGGFNFSQILPDPSKPSKRSFIEDLLFNKVTLADAGFIKQYGDCLGDIAARDLICAQKFNGLTVLPPLLTDEMIAQYTSALLAGTITSGWTFGAGAALQIPFAMQMAYRFNGIGVTQNVLYENQKLIANQFNSAIGKIQDSLSSTASALGKLQDVVNQNAQALNTLVKQLSSNFGAISSVLNDILSRLDPPEAEVQIDRLITGRLQSLQTYVTQQLIRAAEIRASANLAATKMSECVLGQSKRVDFCGKGYHLMSFPQSAPHGVVFLHVTYVPAQEKNFTTAPAICHDGKAHFPREGVFVSNGTHWFVTQRNFYEPQIITTDNTFVSGNCDVVIGIVNNTVYDPLQSELDSIKEELDKIHKNGSGGSGDIIKLLNEQVNKEMQSSNLYMSMSSWCYTHSLDGAGLFLFDHAAEEYEHAKKLIIFLNENNVPVQLTSISAPEHKFEGLTQIFQKAYEHEQHISESINNIVDHAIKSKDHATFNFLQWYVAEQHEEEVLFKDILDKIELIGNENHGLYLADQYVKGIAKSRKSGS

SEQ ID NO: 249 - protein, 1330 aa, synthetic construct
SSQCVNLTTRTQLPPAYTNSFTRGVYYPDKVFRSSVLHSTQDLFLPFFSNVTWFHAIHVSGTNGTKRFDNPVLPFNDGVYFASTEKSNIIRGWIFGTTLDSKTQSLLIVNNATNVVIKVCEFQFCNDPFLGVYYHKNNKSWMESEFRVYSSANNCTFEYVSQPFLMDLEGKQGNFKNLREFVFKNIDGYFKIYSKHTPINLVRDLPQGFSALEPLVDLPIGINITRFQTLLALHRSYLTPGDSSSGWTAGAAAYYVGYLQPRTFLLKYNENGTITDAVDCALDPLSETKCTLKSFTVEKGIYQTSNFRVQPTESIVRFPQGVECDFSKLFKAAAPQIYNFSRLVFTNCNYNLTKLLSLFQVDEFSCHQISPSALASGCYSSLTVDYFAYPLSMKSYLQIGSAGEISQFNYKQDFSNPTCRILASVPANVSITKPDKYIYISQCYSLSAYSDVDVPHYVNPGQYTSIPCLYLTSSGFDEDGQYFRYNLTQFEGQNYLVATGVTVSMTDNLQMVFVITVQYGTDTNSVCPKKSTNLVKNKCVNFNFNGLTGTGVLTESNKKFLPFQQFGRDIADTTDAVRDPQTLEILDITPCSFGGVSVITPGTNTSNQVAVLYQDVNCTEVPVAIHADQLTPTWRVYSTGSNVFQTRAGCLIGAEHVNNSYECDIPIGAGICASYQTQTNSPGSASSVASQSIIAYTMSLGAENSVAYSNNSIAIPTNFTISVTTEILPVSMTKTSVDCTMYICGDSTECSNLLLQYGSFCTQLNRALTGIAVEQDKNTQEVFAQVKQIYKTPPIKDFGGFNFSQILPDPSKPSKRSFIEDLLFNKVTLADAGFIKQYGDCLGDIAARDLICAQKFNGLTVLPPLLTDEMIAQYTSALLAGTITSGWTFGAGAALQIPFAMQMAYRFNGIGVTQNVLYENQKLIANQFNSAIGKIQDSLSSTASALGKLQDVVNQNAQALNTLVKQLSSNFGAISSVLNDILSRLDPPEAEVQIDRLITGRLQSLQTYVTQQLIRAAEIRASANLAATKMSECVLGQSKRVDFCGKGYHLMSFPQSAPHGVVFLHVTYVPAQEKNFTTAPAICHDGKAHFPREGVFVSNGTHWFVTQRNFYEPQIITTDNTFVSGNCDVVIGIVNNTVYDPLQSELDSIKEELDKIHKNGSGGSGDIIKLLNEQVNKEMQSSNLYMSMSSWCYTHSLDGAGLFLFDHAAEEYEHAKKLIIFLNENNVPVQLTSISAPEHKFEGLTQIFQKAYEHEQHISESINNIVDHAIKSKDHATFNFLQWYVAEQHEEEVLFKDILDKIELIGNENHGLYLADQYVKGIAKSRKSGS

SEQ ID NO: 250 - protein, 1329 aa, synthetic construct
SSQCVNLTTRTQLPPAYTNSFTRGVYYPDKVFRSSVLHSTQDLFLPFFSNVTWFHAIHVSGTNGTKRFDNPVLPFNDGVYFASTEKSNIIRGWIFGTTLDSKTQSLLIVNNATNVVIKVCEFQFCNDPFLGVYYHKNNKSWMESEFRVYSSANNCTFEYVSQPFLMDLEGKQGNFKNLREFVFKNIDGYFKIYSKHTPINLVRDLPQGFSALEPLVDLPIGINITRFQTLLALHRSYLTPGDSSSGWTAGAAAYYVGYLQPRTFLLKYNENGTITDAVDCALDPLSETKCTLKSFTVEKGIYQTSNFRVQPTESIVRFPELTECDLDVLFKNDAPIIANYSRRVFTNCNYNLTKLLSLVQVDEFVCHKTTPEALATGCYSSLTVDWFALPFSMKSTLAIGSAEAISMFNYNQDYSNPTCRIHAAVTANVSTALNFTANANYAYISRCQGVDGKPILLQPGQMTNIACRSGVLARPSDADYFGYSFQGRNYYLGRKSYKPKTDEGDVQMVYVITPKYDKGPDTVCPLKKKSTNLVKNKCVNFNFNGLTGTGVLTESNKKFLPFQQFGRDIADTTDAVRDPQTLEILDITPCSFGGVSVITPGTNTSNQVAVLYQDVNCTEVPVAIHADQLTPTWRVYSTGSNVFQTRAGCLIGAEHVNNSYECDIPIGAGICASYQTQTNSPGSASSVASQSIIAYTMSLGAENSVAYSNNSIAIPTNFTISVTTEILPVSMTKTSVDCTMYICGDSTECSNLLLQYGSFCTQLNRALTGIAVEQDKNTQEVFAQVKQIYKTPPIKDFGGFNFSQILPDPSKPSKRSFIEDLLFNKVTLADAGFIKQYGDCLGDIAARDLICAQKFNGLTVLPPLLTDEMIAQYTSALLAGTITSGWTFGAGAALQIPFAMQMAYRFNGIGVTQNVLYENQKLIANQFNSAIGKIQDSLSSTASALGKLQDVVNQNAQALNTLVKQLSSNFGAISSVLNDILSRLDPPEAEVQIDRLITGRLQSLQTYVTQQLIRAAEIRASANLAATKMSECVLGQSKRVDFCGKGYHLMSFPQSAPHGVVFLHVTYVPAQEKNFTTAPAICHDGKAHFPREGVFVSNGTHWFVTQRNFYEPQIITTDNTFVSGNCDVVIGIVNNTVYDPLQSELDSIKEELDKIHKNGSGGSGDIIKLLNEQVNKEMQSSNLYMSMSSWCYTHSLDGAGLFLFDHAAEEYEHAKKLIIFLNENNVPVQLTSISAPEHKFEGLTQIFQKAYEHEQHISESINNIVDHAIKSKDHATFNFLQWYVAEQHEEEVLFKDILDKIELIGNENHGLYLADQYVKGIAKSRKSGS

SEQ ID NO: 251 - protein, 1325 aa, synthetic construct
SSQCVNLTTRTQLPPAYTNSFTRGVYYPDKVFRSSVLHSTQDLFLPFFSNVTWFHAIHVSGTNGTKRFDNPVLPFNDGVYFASTEKSNIIRGWIFGTTLDSKTQSLLIVNNATNVVIKVCEFQFCNDPFLGVYYHKNNKSWMESEFRVYSSANNCTFEYVSQPFLMDLEGKQGNFKNLREFVFKNIDGYFKIYSKHTPINLVRDLPQGFSALEPLVDLPIGINITRFQTLLALHRSYLTPGDSSSGWTAGAAAYYVGYLQPRTFLLKYNENGTITDAVDCALDPLSETKCTLKSFTVEKGIYQTSNFRVQPTESIVRFPVYPDCNFTELFRERAPTIMQYKREVFTRCNYNLSLLLSLVQVDEFVCDKITPEALATGCYSSLTVDWFAFPYAWKSYLAIGSADRIVRFNYNQDYSNPSCRIHSKVNSSIGISYAGAYSYITNCNYGATNKDDVVKPGGRASQQCITGALNSPTTGQLWAYNFGGVPYRVSRLTYTDHLSDPLDMVYVITVKYEPGAETVCPKQKKSTNLVKNKCVNFNFNGLTGTGVLTESNKKFLPFQQFGRDIADTTDAVRDPQTLEILDITPCSFGGVSVITPGTNTSNQVAVLYQDVNCTEVPVAIHADQLTPTWRVYSTGSNVFQTRAGCLIGAEHVNNSYECDIPIGAGICASYQTQTNSPGSASSVASQSIIAYTMSLGAENSVAYSNNSIAIPTNFTISVTTEILPVSMTKTSVDCTMYICGDSTECSNLLLQYGSFCTQLNRALTGIAVEQDKNTQEVFAQVKQIYKTPPIKDFGGFNFSQILPDPSKPSKRSFIEDLLFNKVTLADAGFIKQYGDCLGDIAARDLICAQKFNGLTVLPPLLTDEMIAQYTSALLAGTITSGWTFGAGAALQIPFAMQMAYRFNGIGVTQNVLYENQKLIANQFNSAIGKIQDSLSSTASALGKLQDVVNQNAQALNTLVKQLSSNFGAISSVLNDILSRLDPPEAEVQIDRLITGRLQSLQTYVTQQLIRAAEIRASANLAATKMSECVLGQSKRVDFCGKGYHLMSFPQSAPHGVVFLHVTYVPAQEKNFTTAPAICHDGKAHFPREGVFVSNGTHWFVTQRNFYEPQIITTDNTFVSGNCDVVIGIVNNTVYDPLQSELDSIKEELDKIHKNGSGGSGDIIKLLNEQVNKEMQSSNLYMSMSSWCYTHSLDGAGLFLFDHAAEEYEHAKKLIIFLNENNVPVQLTSISAPEHKFEGLTQIFQKAYEHEQHISESINNIVDHAIKSKDHATFNFLQWYVAEQHEEEVLFKDILDKIELIGNENHGLYLADQYVKGIAKSRKSGS

SEQ ID NO: 252 - protein, 1331 aa, synthetic construct
SSQCVNLTTRTQLPPAYTNSFTRGVYYPDKVFRSSVLHSTQDLFLPFFSNVTWFHAIHVSGTNGTKRFDNPVLPFNDGVYFASTEKSNIIRGWIFGTTLDSKTQSLLIVNNATNVVIKVCEFQFCNDPFLGVYYHKNNKSWMESEFRVYSSANNCTFEYVSQPFLMDLEGKQGNFKNLREFVFKNIDGYFKIYSKHTPINLVRDLPQGFSALEPLVDLPIGINITRFQTLLALHRSYLTPGDSSSGWTAGAAAYYVGYLQPRTFLLKYNENGTITDAVDCALDPLSETKCTLKSFTVEKGIYQTSNFRVQPTESIVRFPQATECDFSPMLTGVAPQVYNFKRLVFSNCNYNLTKLLSLFAVDEFSCNGISPDAIARGCYSTLTVDYFAYPLSMKSYIRPGSAGNIPLYNYKQSFANPTCRVMASVPANVTITKPDAYGYISKCSRLTGANQDVETPLYINPGEYSICRDFSPGGFSEDGQVFKRTLTQFEGGGLLIGVGTRVPMTDNLQMSFIIFVQYGTGTDSVCPMLKKSTNLVKNKCVNFNFNGLTGTGVLTESNKKFLPFQQFGRDIADTTDAVRDPQTLEILDITPCSFGGVSVITPGTNTSNQVAVLYQDVNCTEVPVAIHADQLTPTWRVYSTGSNVFQTRAGCLIGAEHVNNSYECDIPIGAGICASYQTQTNSPGSASSVASQSIIAYTMSLGAENSVAYSNNSIAIPTNFTISVTTEILPVSMTKTSVDCTMYICGDSTECSNLLLQYGSFCTQLNRALTGIAVEQDKNTQEVFAQVKQIYKTPPIKDFGGFNFSQILPDPSKPSKRSFIEDLLFNKVTLADAGFIKQYGDCLGDIAARDLICAQKFNGLTVLPPLLTDEMIAQYTSALLAGTITSGWTFGAGAALQIPFAMQMAYRFNGIGVTQNVLYENQKLIANQFNSAIGKIQDSLSSTASALGKLQDVVNQNAQALNTLVKQLSSNFGAISSVLNDILSRLDPPEAEVQIDRLITGRLQSLQTYVTQQLIRAAEIRASANLAATKMSECVLGQSKRVDFCGKGYHLMSFPQSAPHGVVFLHVTYVPAQEKNFTTAPAICHDGKAHFPREGVFVSNGTHWFVTQRNFYEPQIITTDNTFVSGNCDVVIGIVNNTVYDPLQSELDSIKEELDKIHKNGSGGSGDIIKLLNEQVNKEMQSSNLYMSMSSWCYTHSLDGAGLFLFDHAAEEYEHAKKLIIFLNENNVPVQLTSISAPEHKFEGLTQIFQKAYEHEQHISESINNIVDHAIKSKDHATFNFLQWYVAEQHEEEVLFKDILDKIELIGNENHGLYLADQYVKGIAKSRKSGS

SEQ ID NO: 253 - protein, 1322 aa, synthetic construct
SSQCVNLTTRTQLPPAYTNSFTRGVYYPDKVFRSSVLHSTQDLFLPFFSNVTWFHAIHVSGTNGTKRFDNPVLPFNDGVYFASTEKSNIIRGWIFGTTLDSKTQSLLIVNNATNVVIKVCEFQFCNDPFLGVYYHKNNKSWMESEFRVYSSANNCTFEYVSQPFLMDLEGKQGNFKNLREFVFKNIDGYFKIYSKHTPINLVRDLPQGFSALEPLVDLPIGINITRFQTLLALHRSYLTPGDSSSGWTAGAAAYYVGYLQPRTFLLKYNENGTITDAVDCALDPLSETKCTLKSFTVEKGIYQTSNFRVQPTESIVRFPQGVECDFSKLFKAAPPQIYNFSRLVFTNCNYNLTKLLSLFHVSEFSCHQVSPSALASGCYSSLTVDYFAYPLYLASYLQQGSTGEIAQYNYKQDFSNPTCRILASVPANVSIPKPDKYIWLSQCYSFSAYSGDIPHYVQPGQYTPCLYLTSSGFDKSYQTNRDMQNKMAATGVTSSMTDNLQMAFVISVQYGTDTNSVCPMKKSTNLVKNKCVNFNFNGLTGTGVLTESNKKFLPFQQFGRDIADTTDAVRDPQTLEILDITPCSFGGVSVITPGTNTSNQVAVLYQDVNCTEVPVAIHADQLTPTWRVYSTGSNVFQTRAGCLIGAEHVNNSYECDIPIGAGICASYQTQTNSPGSASSVASQSIIAYTMSLGAENSVAYSNNSIAIPTNFTISVTTEILPVSMTKTSVDCTMYICGDSTECSNLLLQYGSFCTQLNRALTGIAVEQDKNTQEVFAQVKQIYKTPPIKDFGGFNFSQILPDPSKPSKRSFIEDLLFNKVTLADAGFIKQYGDCLGDIAARDLICAQKFNGLTVLPPLLTDEMIAQYTSALLAGTITSGWTFGAGAALQIPFAMQMAYRFNGIGVTQNVLYENQKLIANQFNSAIGKIQDSLSSTASALGKLQDVVNQNAQALNTLVKQLSSNFGAISSVLNDILSRLDPPEAEVQIDRLITGRLQSLQTYVTQQLIRAAEIRASANLAATKMSECVLGQSKRVDFCGKGYHLMSFPQSAPHGVVFLHVTYVPAQEKNFTTAPAICHDGKAHFPREGVFVSNGTHWFVTQRNFYEPQIITTDNTFVSGNCDVVIGIVNNTVYDPLQSELDSIKEELDKIHKNGSGGSGDIIKLLNEQVNKEMQSSNLYMSMSSWCYTHSLDGAGLFLFDHAAEEYEHAKKLIIFLNENNVPVQLTSISAPEHKFEGLTQIFQKAYEHEQHISESINNIVDHAIKSKDHATFNFLQWYVAEQHEEEVLFKDILDKIELIGNENHGLYLADQYVKGIAKSRKSGS

SEQ ID NO: 254 - protein, 1322 aa, synthetic construct
SSQCVNLTTRTQLPPAYTNSFTRGVYYPDKVFRSSVLHSTQDLFLPFFSNVTWFHAIHVSGTNGTKRFDNPVLPFNDGVYFASTEKSNIIRGWIFGTTLDSKTQSLLIVNNATNVVIKVCEFQFCNDPFLGVYYHKNNKSWMESEFRVYSSANNCTFEYVSQPFLMDLEGKQGNFKNLREFVFKNIDGYFKIYSKHTPINLVRDLPQGFSALEPLVDLPIGINITRFQTLLALHRSYLTPGDSSSGWTAGAAAYYVGYLQPRTFLLKYNENGTITDAVDCALDPLSETKCTLKSFTVEKGIYQTSNFRVQPTESIVRFPQGVECDFSKLFKAAPPQIYNFSRLVFTNCNYNLTKLLSLFHVSEFSCHQVSPSALASGCYSSLTVDYFAYPLYLASYLQQGSTGEIAQYNYKQDFSNPTCRILASVPANVSIPKPDKYIWLSQCYSFSAYSGDVPHYVLPGQYTPCLYLTSSGFDNSYQTNRDFQNKMAATGVISSMTDNLQMAFVISVQYGTDTNSVCPMKKSTNLVKNKCVNFNFNGLTGTGVLTESNKKFLPFQQFGRDIADTTDAVRDPQTLEILDITPCSFGGVSVITPGTNTSNQVAVLYQDVNCTEVPVAIHADQLTPTWRVYSTGSNVFQTRAGCLIGAEHVNNSYECDIPIGAGICASYQTQTNSPGSASSVASQSIIAYTMSLGAENSVAYSNNSIAIPTNFTISVTTEILPVSMTKTSVDCTMYICGDSTECSNLLLQYGSFCTQLNRALTGIAVEQDKNTQEVFAQVKQIYKTPPIKDFGGFNFSQILPDPSKPSKRSFIEDLLFNKVTLADAGFIKQYGDCLGDIAARDLICAQKFNGLTVLPPLLTDEMIAQYTSALLAGTITSGWTFGAGAALQIPFAMQMAYRFNGIGVTQNVLYENQKLIANQFNSAIGKIQDSLSSTASALGKLQDVVNQNAQALNTLVKQLSSNFGAISSVLNDILSRLDPPEAEVQIDRLITGRLQSLQTYVTQQLIRAAEIRASANLAATKMSECVLGQSKRVDFCGKGYHLMSFPQSAPHGVVFLHVTYVPAQEKNFTTAPAICHDGKAHFPREGVFVSNGTHWFVTQRNFYEPQIITTDNTFVSGNCDVVIGIVNNTVYDPLQSELDSIKEELDKIHKNGSGGSGDIIKLLNEQVNKEMQSSNLYMSMSSWCYTHSLDGAGLFLFDHAAEEYEHAKKLIIFLNENNVPVQLTSISAPEHKFEGLTQIFQKAYEHEQHISESINNIVDHAIKSKDHATFNFLQWYVAEQHEEEVLFKDILDKIELIGNENHGLYLADQYVKGIAKSRKSGS

SEQ ID NO: 255 - protein, 1320 aa, synthetic construct
SSQCVNLTTRTQLPPAYTNSFTRGVYYPDKVFRSSVLHSTQDLFLPFFSNVTWFHAIHVSGTNGTKRFDNPVLPFNDGVYFASTEKSNIIRGWIFGTTLDSKTQSLLIVNNATNVVIKVCEFQFCNDPFLGVYYHKNNKSWMESEFRVYSSANNCTFEYVSQPFLMDLEGKQGNFKNLREFVFKNIDGYFKIYSKHTPINLVRDLPQGFSALEPLVDLPIGINITRFQTLLALHRSYLTPGDSSSGWTAGAAAYYVGYLQPRTFLLKYNENGTITDAVDCALDPLSETKCTLKSFTVEKGIYQTSNFRVQPTESIVRFPTTQECDFTPMLTGTPPPIYNFKRLVFTNCNYNLTKLLSLFQVSEFSCHQVSPSSLATGCYSSLTVDYFAYSTDMSSYLQPGSAGAIVQFNYKQDFSNPTCRVLATVPQNLTTITKPSNYAYLTECYKTSAYGKNYLYNAPGAYTPCLSLASRGFSTKYQSHSDGELTTTGYIYPVTGNLQMAFIISVQYGTDTNSVCPMKKSTNLVKNKCVNFNFNGLTGTGVLTESNKKFLPFQQFGRDIADTTDAVRDPQTLEILDITPCSFGGVSVITPGTNTSNQVAVLYQDVNCTEVPVAIHADQLTPTWRVYSTGSNVFQTRAGCLIGAEHVNNSYECDIPIGAGICASYQTQTNSPGSASSVASQSIIAYTMSLGAENSVAYSNNSIAIPTNFTISVTTEILPVSMTKTSVDCTMYICGDSTECSNLLLQYGSFCTQLNRALTGIAVEQDKNTQEVFAQVKQIYKTPPIKDFGGFNFSQILPDPSKPSKRSFIEDLLFNKVTLADAGFIKQYGDCLGDIAARDLICAQKFNGLTVLPPLLTDEMIAQYTSALLAGTITSGWTFGAGAALQIPFAMQMAYRFNGIGVTQNVLYENQKLIANQFNSAIGKIQDSLSSTASALGKLQDVVNQNAQALNTLVKQLSSNFGAISSVLNDILSRLDPPEAEVQIDRLITGRLQSLQTYVTQQLIRAAEIRASANLAATKMSECVLGQSKRVDFCGKGYHLMSFPQSAPHGVVFLHVTYVPAQEKNFTTAPAICHDGKAHFPREGVFVSNGTHWFVTQRNFYEPQIITTDNTFVSGNCDVVIGIVNNTVYDPLQSELDSIKEELDKIHKNGSGGSGDIIKLLNEQVNKEMQSSNLYMSMSSWCYTHSLDGAGLFLFDHAAEEYEHAKKLIIFLNENNVPVQLTSISAPEHKFEGLTQIFQKAYEHEQHISESINNIVDHAIKSKDHATFNFLQWYVAEQHEEEVLFKDILDKIELIGNENHGLYLADQYVKGIAKSRKSGS

SEQ ID NO: 256 - protein, 1520 aa, synthetic construct
NITNLCPFDEVFNATRFASVYAWNRKRISNCVADYSVLYNFAPFFAFKCYGVSPTKLNDLCFTNVYADSFVIRGNEVSQIAPGQTGNIADYNYKLPDDFTGCVIAWNSNKLDSKVGGNYNYRYRLFRKSNLKPFERDISTEIYQAGNKPCNGVAGVNCYFPLQSYGFRPTYGVGHQPYRVVVLSFELLHAPATVCGPGSGGSGSSQCVNLTTRTQLPPAYTNSFTRGVYYPDKVFRSSVLHSTQDLFLPFFSNVTWFHAIHVSGTNGTKRFDNPVLPFNDGVYFASTEKSNIIRGWIFGTTLDSKTQSLLIVNNATNVVIKVCEFQFCNDPFLGVYYHKNNKSWMESEFRVYSSANNCTFEYVSQPFLMDLEGKQGNFKNLREFVFKNIDGYFKIYSKHTPINLVRDLPQGFSALEPLVDLPIGINITRFQTLLALHRSYLTPGDSSSGWTAGAAAYYVGYLQPRTFLLKYNENGTITDAVDCALDPLSETKCTLKSFTVEKGIYQTSNFRVQPTESIVRFPNITNLCPFGEVFNATKFPSVYAWERKKISNCVADYSVLYNSTFFSTFKCYGVSATKLNDLCFSNVYADSFVVKGDDVRQIAPGQTGVIADYNYKLPDDFMGCVLAWNTRNIDATSTGNYNYKYRYLRHGKLRPFERDISNVPFSPDGKPCTPPALNCYWPLNDYGFYTTTGIGYQPYRVVVLSFELLNAPATVCGPKKSTNLVKNKCVNFNFNGLTGTGVLTESNKKFLPFQQFGRDIADTTDAVRDPQTLEILDITPCSFGGVSVITPGTNTSNQVAVLYQDVNCTEVPVAIHADQLTPTWRVYSTGSNVFQTRAGCLIGAEHVNNSYECDIPIGAGICASYQTQTNSPGSASSVASQSIIAYTMSLGAENSVAYSNNSIAIPTNFTISVTTEILPVSMTKTSVDCTMYICGDSTECSNLLLQYGSFCTQLNRALTGIAVEQDKNTQEVFAQVKQIYKTPPIKDFGGFNFSQILPDPSKPSKRSFIEDLLFNKVTLADAGFIKQYGDCLGDIAARDLICAQKFNGLTVLPPLLTDEMIAQYTSALLAGTITSGWTFGAGAALQIPFAMQMAYRFNGIGVTQNVLYENQKLIANQFNSAIGKIQDSLSSTASALGKLQDVVNQNAQALNTLVKQLSSNFGAISSVLNDILSRLDPPEAEVQIDRLITGRLQSLQTYVTQQLIRAAEIRASANLAATKMSECVLGQSKRVDFCGKGYHLMSFPQSAPHGVVFLHVTYVPAQEKNFTTAPAICHDGKAHFPREGVFVSNGTHWFVTQRNFYEPQIITTDNTFVSGNCDVVIGIVNNTVYDPLQSELDSIKEELDKIHKNGSGGSGDIIKLLNEQVNKEMQSSNLYMSMSSWCYTHSLDGAGLFLFDHAAEEYEHAKKLIIFLNENNVPVQLTSISAPEHKFEGLTQIFQKAYEHEQHISESINNIVDHAIKSKDHATFNFLQWYVAEQHEEEVLFKDILDKIELIGNENHGLYLADQYVKGIAKSRKSGS

SEQ ID NO: 257 - protein, 1520 aa, synthetic construct
NITNLCPFDEVFNATRFASVYAWNRKRISNCVADYSVLYNFAPFFAFKCYGVSPTKLNDLCFTNVYADSFVIRGNEVSQIAPGQTGNIADYNYKLPDDFTGCVIAWNSNKLDSKVGGNYNYQYRLFRKSNLKPFERDISTEIYQAGNKPCNGVAGFNCYFPLRSYGFRPTYGVGHQPYRVVVLSFELLHAPATVCGPGSGGSGSSQCVNLTTRTQLPPAYTNSFTRGVYYPDKVFRSSVLHSTQDLFLPFFSNVTWFHAIHVSGTNGTKRFDNPVLPFNDGVYFASTEKSNIIRGWIFGTTLDSKTQSLLIVNNATNVVIKVCEFQFCNDPFLGVYYHKNNKSWMESEFRVYSSANNCTFEYVSQPFLMDLEGKQGNFKNLREFVFKNIDGYFKIYSKHTPINLVRDLPQGFSALEPLVDLPIGINITRFQTLLALHRSYLTPGDSSSGWTAGAAAYYVGYLQPRTFLLKYNENGTITDAVDCALDPLSETKCTLKSFTVEKGIYQTSNFRVQPTESIVRFPNITNLCPFGEVFNATKFPSVYAWERKKISNCVADYSVLYNSTFFSTFKCYGVSATKLNDLCFSNVYADSFVVKGDDVRQIAPGQTGVIADYNYKLPDDFMGCVLAWNTRNIDATSTGNYNYKYRYLRHGKLRPFERDISNVPFSPDGKPCTPPALNCYWPLNDYGFYTTTGIGYQPYRVVVLSFELLNAPATVCGPKKSTNLVKNKCVNFNFNGLTGTGVLTESNKKFLPFQQFGRDIADTTDAVRDPQTLEILDITPCSFGGVSVITPGTNTSNQVAVLYQDVNCTEVPVAIHADQLTPTWRVYSTGSNVFQTRAGCLIGAEHVNNSYECDIPIGAGICASYQTQTNSPGSASSVASQSIIAYTMSLGAENSVAYSNNSIAIPTNFTISVTTEILPVSMTKTSVDCTMYICGDSTECSNLLLQYGSFCTQLNRALTGIAVEQDKNTQEVFAQVKQIYKTPPIKDFGGFNFSQILPDPSKPSKRSFIEDLLFNKVTLADAGFIKQYGDCLGDIAARDLICAQKFNGLTVLPPLLTDEMIAQYTSALLAGTITSGWTFGAGAALQIPFAMQMAYRFNGIGVTQNVLYENQKLIANQFNSAIGKIQDSLSSTASALGKLQDVVNQNAQALNTLVKQLSSNFGAISSVLNDILSRLDPPEAEVQIDRLITGRLQSLQTYVTQQLIRAAEIRASANLAATKMSECVLGQSKRVDFCGKGYHLMSFPQSAPHGVVFLHVTYVPAQEKNFTTAPAICHDGKAHFPREGVFVSNGTHWFVTQRNFYEPQIITTDNTFVSGNCDVVIGIVNNTVYDPLQSELDSIKEELDKIHKNGSGGSGDIIKLLNEQVNKEMQSSNLYMSMSSWCYTHSLDGAGLFLFDHAAEEYEHAKKLIIFLNENNVPVQLTSISAPEHKFEGLTQIFQKAYEHEQHISESINNIVDHAIKSKDHATFNFLQWYVAEQHEEEVLFKDILDKIELIGNENHGLYLADQYVKGIAKSRKSGS

SEQ ID NO: 258 - protein, 1516 aa, synthetic construct
NITQLCPFNEVFNITSFPSVYAWERMRITNCVADYSVLYNSSASFSTFQCYGVSPTKLNDLCFSSVYADYFVVKGDDVRQIAPAQTGVIADYNYKLPDDFTGCVIAWNTNSLDSSNEFFYRRFRHGKIKPYGRDLSNVLFNPSGGTCSAEGLNCYKPLASYGFTQSSGIGFQPYRVVVLSFELLNAPATVCGPGSGGSGSSQCVNLTTRTQLPPAYTNSFTRGVYYPDKVFRSSVLHSTQDLFLPFFSNVTWFHAIHVSGTNGTKRFDNPVLPFNDGVYFASTEKSNIIRGWIFGTTLDSKTQSLLIVNNATNVVIKVCEFQFCNDPFLGVYYHKNNKSWMESEFRVYSSANNCTFEYVSQPFLMDLEGKQGNFKNLREFVFKNIDGYFKIYSKHTPINLVRDLPQGFSALEPLVDLPIGINITRFQTLLALHRSYLTPGDSSSGWTAGAAAYYVGYLQPRTFLLKYNENGTITDAVDCALDPLSETKCTLKSFTVEKGIYQTSNFRVQPTESIVRFPNITNLCPFGEVFNATKFPSVYAWERKKISNCVADYSVLYNSTFFSTFKCYGVSATKLNDLCFSNVYADSFVVKGDDVRQIAPGQTGVIADYNYKLPDDFMGCVLAWNTRNIDATSTGNYNYKYRYLRHGKLRPFERDISNVPFSPDGKPCTPPALNCYWPLNDYGFYTTTGIGYQPYRVVVLSFELLNAPATVCGPKKSTNLVKNKCVNFNFNGLTGTGVLTESNKKFLPFQQFGRDIADTTDAVRDPQTLEILDITPCSFGGVSVITPGTNTSNQVAVLYQDVNCTEVPVAIHADQLTPTWRVYSTGSNVFQTRAGCLIGAEHVNNSYECDIPIGAGICASYQTQTNSPGSASSVASQSIIAYTMSLGAENSVAYSNNSIAIPTNFTISVTTEILPVSMTKTSVDCTMYICGDSTECSNLLLQYGSFCTQLNRALTGIAVEQDKNTQEVFAQVKQIYKTPPIKDFGGFNFSQILPDPSKPSKRSFIEDLLFNKVTLADAGFIKQYGDCLGDIAARDLICAQKFNGLTVLPPLLTDEMIAQYTSALLAGTITSGWTFGAGAALQIPFAMQMAYRFNGIGVTQNVLYENQKLIANQFNSAIGKIQDSLSSTASALGKLQDVVNQNAQALNTLVKQLSSNFGAISSVLNDILSRLDPPEAEVQIDRLITGRLQSLQTYVTQQLIRAAEIRASANLAATKMSECVLGQSKRVDFCGKGYHLMSFPQSAPHGVVFLHVTYVPAQEKNFTTAPAICHDGKAHFPREGVFVSNGTHWFVTQRNFYEPQIITTDNTFVSGNCDVVIGIVNNTVYDPLQSELDSIKEELDKIHKNGSGGSGDIIKLLNEQVNKEMQSSNLYMSMSSWCYTHSLDGAGLFLFDHAAEEYEHAKKLIIFLNENNVPVQLTSISAPEHKFEGLTQIFQKAYEHEQHISESINNIVDHAIKSKDHATFNFLQWYVAEQHEEEVLFKDILDKIELIGNENHGLYLADQYVKGIAKSRKSGS

SEQ ID NO: 259 - protein, 1516 aa, synthetic construct
NITQLCPFNEVFNITSFPSVYAWERMRITNCVADYSVLYNSSASFSTFQCYGVSPTKLNDLCFSSVYADYFVVKGDDVRQIAPAQTGVIADYNYKLPDDFTGCVIAWNTNSLDSSNEFFYRRFRHGKIKPYGRDLSNVLFNPSGGTCSAEGLNCYKPLASYGFWQSSGIGFQPYRVVVLSFELLNAPATVCGPGSGGSGSSQCVNLTTRTQLPPAYTNSFTRGVYYPDKVFRSSVLHSTQDLFLPFFSNVTWFHAIHVSGTNGTKRFDNPVLPFNDGVYFASTEKSNIIRGWIFGTTLDSKTQSLLIVNNATNVVIKVCEFQFCNDPFLGVYYHKNNKSWMESEFRVYSSANNCTFEYVSQPFLMDLEGKQGNFKNLREFVFKNIDGYFKIYSKHTPINLVRDLPQGFSALEPLVDLPIGINITRFQTLLALHRSYLTPGDSSSGWTAGAAAYYVGYLQPRTFLLKYNENGTITDAVDCALDPLSETKCTLKSFTVEKGIYQTSNFRVQPTESIVRFPNITNLCPFGEVFNATKFPSVYAWERKKISNCVADYSVLYNSTFFSTFKCYGVSATKLNDLCFSNVYADSFVVKGDDVRQIAPGQTGVIADYNYKLPDDFMGCVLAWNTRNIDATSTGNYNYKYRYLRHGKLRPFERDISNVPFSPDGKPCTPPALNCYWPLNDYGFYTTTGIGYQPYRVVVLSFELLNAPATVCGPKKSTNLVKNKCVNFNFNGLTGTGVLTESNKKFLPFQQFGRDIADTTDAVRDPQTLEILDITPCSFGGVSVITPGTNTSNQVAVLYQDVNCTEVPVAIHADQLTPTWRVYSTGSNVFQTRAGCLIGAEHVNNSYECDIPIGAGICASYQTQTNSPGSASSVASQSIIAYTMSLGAENSVAYSNNSIAIPTNFTISVTTEILPVSMTKTSVDCTMYICGDSTECSNLLLQYGSFCTQLNRALTGIAVEQDKNTQEVFAQVKQIYKTPPIKDFGGFNFSQILPDPSKPSKRSFIEDLLFNKVTLADAGFIKQYGDCLGDIAARDLICAQKFNGLTVLPPLLTDEMIAQYTSALLAGTITSGWTFGAGAALQIPFAMQMAYRFNGIGVTQNVLYENQKLIANQFNSAIGKIQDSLSSTASALGKLQDVVNQNAQALNTLVKQLSSNFGAISSVLNDILSRLDPPEAEVQIDRLITGRLQSLQTYVTQQLIRAAEIRASANLAATKMSECVLGQSKRVDFCGKGYHLMSFPQSAPHGVVFLHVTYVPAQEKNFTTAPAICHDGKAHFPREGVFVSNGTHWFVTQRNFYEPQIITTDNTFVSGNCDVVIGIVNNTVYDPLQSELDSIKEELDKIHKNGSGGSGDIIKLLNEQVNKEMQSSNLYMSMSSWCYTHSLDGAGLFLFDHAAEEYEHAKKLIIFLNENNVPVQLTSISAPEHKFEGLTQIFQKAYEHEQHISESINNIVDHAIKSKDHATFNFLQWYVAEQHEEEVLFKDILDKIELIGNENHGLYLADQYVKGIAKSRKSGS

SEQ ID NO: 260 - protein, 1516 aa, synthetic construct
NITQLCPFNEVFNITSFPSVYAWERMRITNCVADYSVLYNSSASFSTFQCYGVSPTKLNDLCFSSVYADYFVVKGDDVRQIAPAQTGVIADYNYKLPDDFTGCVIAWNTNSLDSSNEFFYRRFRHGKIKPYGRDLSNVLFNPSGGTCSAEGLNCYKPLYSYGFWQSSGIGFQPYRVVVLSFELLNAPATVCGPGSGGSGSSQCVNLTTRTQLPPAYTNSFTRGVYYPDKVFRSSVLHSTQDLFLPFFSNVTWFHAIHVSGTNGTKRFDNPVLPFNDGVYFASTEKSNIIRGWIFGTTLDSKTQSLLIVNNATNVVIKVCEFQFCNDPFLGVYYHKNNKSWMESEFRVYSSANNCTFEYVSQPFLMDLEGKQGNFKNLREFVFKNIDGYFKIYSKHTPINLVRDLPQGFSALEPLVDLPIGINITRFQTLLALHRSYLTPGDSSSGWTAGAAAYYVGYLQPRTFLLKYNENGTITDAVDCALDPLSETKCTLKSFTVEKGIYQTSNFRVQPTESIVRFPNITNLCPFGEVFNATKFPSVYAWERKKISNCVADYSVLYNSTFFSTFKCYGVSATKLNDLCFSNVYADSFVVKGDDVRQIAPGQTGVIADYNYKLPDDFMGCVLAWNTRNIDATSTGNYNYKYRYLRHGKLRPFERDISNVPFSPDGKPCTPPALNCYWPLNDYGFYTTTGIGYQPYRVVVLSFELLNAPATVCGPKKSTNLVKNKCVNFNFNGLTGTGVLTESNKKFLPFQQFGRDIADTTDAVRDPQTLEILDITPCSFGGVSVITPGTNTSNQVAVLYQDVNCTEVPVAIHADQLTPTWRVYSTGSNVFQTRAGCLIGAEHVNNSYECDIPIGAGICASYQTQTNSPGSASSVASQSIIAYTMSLGAENSVAYSNNSIAIPTNFTISVTTEILPVSMTKTSVDCTMYICGDSTECSNLLLQYGSFCTQLNRALTGIAVEQDKNTQEVFAQVKQIYKTPPIKDFGGFNFSQILPDPSKPSKRSFIEDLLFNKVTLADAGFIKQYGDCLGDIAARDLICAQKFNGLTVLPPLLTDEMIAQYTSALLAGTITSGWTFGAGAALQIPFAMQMAYRFNGIGVTQNVLYENQKLIANQFNSAIGKIQDSLSSTASALGKLQDVVNQNAQALNTLVKQLSSNFGAISSVLNDILSRLDPPEAEVQIDRLITGRLQSLQTYVTQQLIRAAEIRASANLAATKMSECVLGQSKRVDFCGKGYHLMSFPQSAPHGVVFLHVTYVPAQEKNFTTAPAICHDGKAHFPREGVFVSNGTHWFVTQRNFYEPQIITTDNTFVSGNCDVVIGIVNNTVYDPLQSELDSIKEELDKIHKNGSGGSGDIIKLLNEQVNKEMQSSNLYMSMSSWCYTHSLDGAGLFLFDHAAEEYEHAKKLIIFLNENNVPVQLTSISAPEHKFEGLTQIFQKAYEHEQHISESINNIVDHAIKSKDHATFNFLQWYVAEQHEEEVLFKDILDKIELIGNENHGLYLADQYVKGIAKSRKSGS

SEQ ID NO: 261 - protein, 1519 aa, synthetic construct
NITNLCPFGEVFNATTFPSVYAWERKRISNCVADYSVLYNSTSFSTFKCYGVSATKLNDLCFSNVYADSFVVKGDDVRQIAPGQTGVIADYNYKLPDDFLGCVLAWNTNSKDSSTSGNYNYLYRWVRRSKLNPYERDLSNDIYSPGGQSCSAVGPNCYNPLRPYGFFTTAGVGHQPYRVVVLSFELLNAPATVCGPGSGGSGSSQCVNLTTRTQLPPAYTNSFTRGVYYPDKVFRSSVLHSTQDLFLPFFSNVTWFHAIHVSGTNGTKRFDNPVLPFNDGVYFASTEKSNIIRGWIFGTTLDSKTQSLLIVNNATNVVIKVCEFQFCNDPFLGVYYHKNNKSWMESEFRVYSSANNCTFEYVSQPFLMDLEGKQGNFKNLREFVFKNIDGYFKIYSKHTPINLVRDLPQGFSALEPLVDLPIGINITRFQTLLALHRSYLTPGDSSSGWTAGAAAYYVGYLQPRTFLLKYNENGTITDAVDCALDPLSETKCTLKSFTVEKGIYQTSNFRVQPTESIVRFPNITNLCPFGEVFNATKFPSVYAWERKKISNCVADYSVLYNSTFFSTFKCYGVSATKLNDLCFSNVYADSFVVKGDDVRQIAPGQTGVIADYNYKLPDDFMGCVLAWNTRNIDATSTGNYNYKYRYLRHGKLRPFERDISNVPFSPDGKPCTPPALNCYWPLNDYGFYTTTGIGYQPYRVVVLSFELLNAPATVCGPKKSTNLVKNKCVNFNFNGLTGTGVLTESNKKFLPFQQFGRDIADTTDAVRDPQTLEILDITPCSFGGVSVITPGTNTSNQVAVLYQDVNCTEVPVAIHADQLTPTWRVYSTGSNVFQTRAGCLIGAEHVNNSYECDIPIGAGICASYQTQTNSPGSASSVASQSIIAYTMSLGAENSVAYSNNSIAIPTNFTISVTTEILPVSMTKTSVDCTMYICGDSTECSNLLLQYGSFCTQLNRALTGIAVEQDKNTQEVFAQVKQIYKTPPIKDFGGFNFSQILPDPSKPSKRSFIEDLLFNKVTLADAGFIKQYGDCLGDIAARDLICAQKFNGLTVLPPLLTDEMIAQYTSALLAGTITSGWTFGAGAALQIPFAMQMAYRFNGIGVTQNVLYENQKLIANQFNSAIGKIQDSLSSTASALGKLQDVVNQNAQALNTLVKQLSSNFGAISSVLNDILSRLDPPEAEVQIDRLITGRLQSLQTYVTQQLIRAAEIRASANLAATKMSECVLGQSKRVDFCGKGYHLMSFPQSAPHGVVFLHVTYVPAQEKNFTTAPAICHDGKAHFPREGVFVSNGTHWFVTQRNFYEPQIITTDNTFVSGNCDVVIGIVNNTVYDPLQSELDSIKEELDKIHKNGSGGSGDIIKLLNEQVNKEMQSSNLYMSMSSWCYTHSLDGAGLFLFDHAAEEYEHAKKLIIFLNENNVPVQLTSISAPEHKFEGLTQIFQKAYEHEQHISESINNIVDHAIKSKDHATFNFLQWYVAEQHEEEVLFKDILDKIELIGNENHGLYLADQYVKGIAKSRKSGS

SEQ ID NO: 262 - protein, 1519 aa, synthetic construct
NITNLCPFGEVFNATTFPSVYAWERKRISNCVADYSVLYNSTSFSTFKCYGVSATKLNDLCFSNVYADSFVVKGDDVRQIAPGQTGVIADYNYKLPDDFTGCVLAWNTRNIDATQTGNYNYKYRSLRHGKLRPFERDISNVPFSPDGKPCTPPAFNCYWPLNDYGFYITNGIGYQPYRVVVLSFELLNAPATVCGPGSGGSGSSQCVNLTTRTQLPPAYTNSFTRGVYYPDKVFRSSVLHSTQDLFLPFFSNVTWFHAIHVSGTNGTKRFDNPVLPFNDGVYFASTEKSNIIRGWIFGTTLDSKTQSLLIVNNATNVVIKVCEFQFCNDPFLGVYYHKNNKSWMESEFRVYSSANNCTFEYVSQPFLMDLEGKQGNFKNLREFVFKNIDGYFKIYSKHTPINLVRDLPQGFSALEPLVDLPIGINITRFQTLLALHRSYLTPGDSSSGWTAGAAAYYVGYLQPRTFLLKYNENGTITDAVDCALDPLSETKCTLKSFTVEKGIYQTSNFRVQPTESIVRFPNITNLCPFGEVFNATKFPSVYAWERKKISNCVADYSVLYNSTFFSTFKCYGVSATKLNDLCFSNVYADSFVVKGDDVRQIAPGQTGVIADYNYKLPDDFMGCVLAWNTRNIDATSTGNYNYKYRYLRHGKLRPFERDISNVPFSPDGKPCTPPALNCYWPLNDYGFYTTTGIGYQPYRVVVLSFELLNAPATVCGPKKSTNLVKNKCVNFNFNGLTGTGVLTESNKKFLPFQQFGRDIADTTDAVRDPQTLEILDITPCSFGGVSVITPGTNTSNQVAVLYQDVNCTEVPVAIHADQLTPTWRVYSTGSNVFQTRAGCLIGAEHVNNSYECDIPIGAGICASYQTQTNSPGSASSVASQSIIAYTMSLGAENSVAYSNNSIAIPTNFTISVTTEILPVSMTKTSVDCTMYICGDSTECSNLLLQYGSFCTQLNRALTGIAVEQDKNTQEVFAQVKQIYKTPPIKDFGGFNFSQILPDPSKPSKRSFIEDLLFNKVTLADAGFIKQYGDCLGDIAARDLICAQKFNGLTVLPPLLTDEMIAQYTSALLAGTITSGWTFGAGAALQIPFAMQMAYRFNGIGVTQNVLYENQKLIANQFNSAIGKIQDSLSSTASALGKLQDVVNQNAQALNTLVKQLSSNFGAISSVLNDILSRLDPPEAEVQIDRLITGRLQSLQTYVTQQLIRAAEIRASANLAATKMSECVLGQSKRVDFCGKGYHLMSFPQSAPHGVVFLHVTYVPAQEKNFTTAPAICHDGKAHFPREGVFVSNGTHWFVTQRNFYEPQIITTDNTFVSGNCDVVIGIVNNTVYDPLQSELDSIKEELDKIHKNGSGGSGDIIKLLNEQVNKEMQSSNLYMSMSSWCYTHSLDGAGLFLFDHAAEEYEHAKKLIIFLNENNVPVQLTSISAPEHKFEGLTQIFQKAYEHEQHISESINNIVDHAIKSKDHATFNFLQWYVAEQHEEEVLFKDILDKIELIGNENHGLYLADQYVKGIAKSRKSGS

SEQ ID NO: 263 - protein, 1501 aa, synthetic construct
NITNVCPFHKVFNATRFPSVYAWERTKISDCIADYTVFYNSTSFSTFKCYGVSPSKLIDLCFTSVYADTFLIRFSEVRQVAPGQTGVIADYNYKLPDDFTGCVIAWNTAKQDTGHYFYRSHRSTKLKPFERDLSSDENGVRTLSTYDFNPNVPLEYQATRVVVLSFELLNAPATVCGPGSGGSGSSQCVNLTTRTQLPPAYTNSFTRGVYYPDKVFRSSVLHSTQDLFLPFFSNVTWFHAIHVSGTNGTKRFDNPVLPFNDGVYFASTEKSNIIRGWIFGTTLDSKTQSLLIVNNATNVVIKVCEFQFCNDPFLGVYYHKNNKSWMESEFRVYSSANNCTFEYVSQPFLMDLEGKQGNFKNLREFVFKNIDGYFKIYSKHTPINLVRDLPQGFSALEPLVDLPIGINITRFQTLLALHRSYLTPGDSSSGWTAGAAAYYVGYLQPRTFLLKYNENGTITDAVDCALDPLSETKCTLKSFTVEKGIYQTSNFRVQPTESIVRFPNITNLCPFGEVFNATKFPSVYAWERKKISNCVADYSVLYNSTFFSTFKCYGVSATKLNDLCFSNVYADSFVVKGDDVRQIAPGQTGVIADYNYKLPDDFMGCVLAWNTRNIDATSTGNYNYKYRYLRHGKLRPFERDISNVPFSPDGKPCTPPALNCYWPLNDYGFYTTTGIGYQPYRVVVLSFELLNAPATVCGPKKSTNLVKNKCVNFNFNGLTGTGVLTESNKKFLPFQQFGRDIADTTDAVRDPQTLEILDITPCSFGGVSVITPGTNTSNQVAVLYQDVNCTEVPVAIHADQLTPTWRVYSTGSNVFQTRAGCLIGAEHVNNSYECDIPIGAGICASYQTQTNSPGSASSVASQSIIAYTMSLGAENSVAYSNNSIAIPTNFTISVTTEILPVSMTKTSVDCTMYICGDSTECSNLLLQYGSFCTQLNRALTGIAVEQDKNTQEVFAQVKQIYKTPPIKDFGGFNFSQILPDPSKPSKRSFIEDLLFNKVTLADAGFIKQYGDCLGDIAARDLICAQKFNGLTVLPPLLTDEMIAQYTSALLAGTITSGWTFGAGAALQIPFAMQMAYRFNGIGVTQNVLYENQKLIANQFNSAIGKIQDSLSSTASALGKLQDVVNQNAQALNTLVKQLSSNFGAISSVLNDILSRLDPPEAEVQIDRLITGRLQSLQTYVTQQLIRAAEIRASANLAATKMSECVLGQSKRVDFCGKGYHLMSFPQSAPHGVVFLHVTYVPAQEKNFTTAPAICHDGKAHFPREGVFVSNGTHWFVTQRNFYEPQIITTDNTFVSGNCDVVIGIVNNTVYDPLQSELDSIKEELDKIHKNGSGGSGDIIKLLNEQVNKEMQSSNLYMSMSSWCYTHSLDGAGLFLFDHAAEEYEHAKKLIIFLNENNVPVQLTSISAPEHKFEGLTQIFQKAYEHEQHISESINNIVDHAIKSKDHATFNFLQWYVAEQHEEEVLFKDILDKIELIGNENHGLYLADQYVKGIAKSRKSGS

SEQ ID NO: 264 - protein, 1520 aa, synthetic construct
NITNLCPFGEVFNATTFASVYAWNRKRISNCVADYSVLYNSTSFSTFKCYGVSPTKLNDLCFTNVYADSFVVRGDEVRQIAPGQTGKIADYNYKLPDDFTGCVIAWNSNNLDSKVGGNYNYLYRLFRKSNLKPFERDISTEIYQAGSTPCNGVEGFNCYFPLQSYGFHPTNGVGYQPYRVVVLSFELLNAPATVCGPGSGGSGSSQCVNLTTRTQLPPAYTNSFTRGVYYPDKVFRSSVLHSTQDLFLPFFSNVTWFHAIHVSGTNGTKRFDNPVLPFNDGVYFASTEKSNIIRGWIFGTTLDSKTQSLLIVNNATNVVIKVCEFQFCNDPFLGVYYHKNNKSWMESEFRVYSSANNCTFEYVSQPFLMDLEGKQGNFKNLREFVFKNIDGYFKIYSKHTPINLVRDLPQGFSALEPLVDLPIGINITRFQTLLALHRSYLTPGDSSSGWTAGAAAYYVGYLQPRTFLLKYNENGTITDAVDCALDPLSETKCTLKSFTVEKGIYQTSNFRVQPTESIVRFPNITNLCPFGEVFNATKFPSVYAWERKKISNCVADYSVLYNSTFFSTFKCYGVSATKLNDLCFSNVYADSFVVKGDDVRQIAPGQTGVIADYNYKLPDDFMGCVLAWNTRNIDATSTGNYNYKYRYLRHGKLRPFERDISNVPFSPDGKPCTPPALNCYWPLNDYGFYTTTGIGYQPYRVVVLSFELLNAPATVCGPKKSTNLVKNKCVNFNFNGLTGTGVLTESNKKFLPFQQFGRDIADTTDAVRDPQTLEILDITPCSFGGVSVITPGTNTSNQVAVLYQDVNCTEVPVAIHADQLTPTWRVYSTGSNVFQTRAGCLIGAEHVNNSYECDIPIGAGICASYQTQTNSPGSASSVASQSIIAYTMSLGAENSVAYSNNSIAIPTNFTISVTTEILPVSMTKTSVDCTMYICGDSTECSNLLLQYGSFCTQLNRALTGIAVEQDKNTQEVFAQVKQIYKTPPIKDFGGFNFSQILPDPSKPSKRSFIEDLLFNKVTLADAGFIKQYGDCLGDIAARDLICAQKFNGLTVLPPLLTDEMIAQYTSALLAGTITSGWTFGAGAALQIPFAMQMAYRFNGIGVTQNVLYENQKLIANQFNSAIGKIQDSLSSTASALGKLQDVVNQNAQALNTLVKQLSSNFGAISSVLNDILSRLDPPEAEVQIDRLITGRLQSLQTYVTQQLIRAAEIRASANLAATKMSECVLGQSKRVDFCGKGYHLMSFPQSAPHGVVFLHVTYVPAQEKNFTTAPAICHDGKAHFPREGVFVSNGTHWFVTQRNFYEPQIITTDNTFVSGNCDVVIGIVNNTVYDPLQSELDSIKEELDKIHKNGSGGSGDIIKLLNEQVNKEMQSSNLYMSMSSWCYTHSLDGAGLFLFDHAAEEYEHAKKLIIFLNENNVPVQLTSISAPEHKFEGLTQIFQKAYEHEQHISESINNIVDHAIKSKDHATFNFLQWYVAEQHEEEVLFKDILDKIELIGNENHGLYLADQYVKGIAKSRKSGS

SEQ ID NO: 265 - protein, 1520 aa, synthetic construct
NITNLCPFGEVFNATTFASVYAWNRKRISNCVADYSVLYNSTSFSTFKCYGVSPTKLNDLCFTNVYADSFVITGDEVRQIAPGQTGKIADYNYKLPDDFTGCVIAWNSKHIDAKEGGNFNYLYRLFRKANLKPFERDISTEIYQAGSKPCNGQTGLNCYYPLYRYGFYPTDGVGHQPYRVVVLSFELLNAPATVCGPGSGGSGSSQCVNLTTRTQLPPAYTNSFTRGVYYPDKVFRSSVLHSTQDLFLPFFSNVTWFHAIHVSGTNGTKRFDNPVLPFNDGVYFASTEKSNIIRGWIFGTTLDSKTQSLLIVNNATNVVIKVCEFQFCNDPFLGVYYHKNNKSWMESEFRVYSSANNCTFEYVSQPFLMDLEGKQGNFKNLREFVFKNIDGYFKIYSKHTPINLVRDLPQGFSALEPLVDLPIGINITRFQTLLALHRSYLTPGDSSSGWTAGAAAYYVGYLQPRTFLLKYNENGTITDAVDCALDPLSETKCTLKSFTVEKGIYQTSNFRVQPTESIVRFPNITNLCPFGEVFNATKFPSVYAWERKKISNCVADYSVLYNSTFFSTFKCYGVSATKLNDLCFSNVYADSFVVKGDDVRQIAPGQTGVIADYNYKLPDDFMGCVLAWNTRNIDATSTGNYNYKYRYLRHGKLRPFERDISNVPFSPDGKPCTPPALNCYWPLNDYGFYTTTGIGYQPYRVVVLSFELLNAPATVCGPKKSTNLVKNKCVNFNFNGLTGTGVLTESNKKFLPFQQFGRDIADTTDAVRDPQTLEILDITPCSFGGVSVITPGTNTSNQVAVLYQDVNCTEVPVAIHADQLTPTWRVYSTGSNVFQTRAGCLIGAEHVNNSYECDIPIGAGICASYQTQTNSPGSASSVASQSIIAYTMSLGAENSVAYSNNSIAIPTNFTISVTTEILPVSMTKTSVDCTMYICGDSTECSNLLLQYGSFCTQLNRALTGIAVEQDKNTQEVFAQVKQIYKTPPIKDFGGFNFSQILPDPSKPSKRSFIEDLLFNKVTLADAGFIKQYGDCLGDIAARDLICAQKFNGLTVLPPLLTDEMIAQYTSALLAGTITSGWTFGAGAALQIPFAMQMAYRFNGIGVTQNVLYENQKLIANQFNSAIGKIQDSLSSTASALGKLQDVVNQNAQALNTLVKQLSSNFGAISSVLNDILSRLDPPEAEVQIDRLITGRLQSLQTYVTQQLIRAAEIRASANLAATKMSECVLGQSKRVDFCGKGYHLMSFPQSAPHGVVFLHVTYVPAQEKNFTTAPAICHDGKAHFPREGVFVSNGTHWFVTQRNFYEPQIITTDNTFVSGNCDVVIGIVNNTVYDPLQSELDSIKEELDKIHKNGSGGSGDIIKLLNEQVNKEMQSSNLYMSMSSWCYTHSLDGAGLFLFDHAAEEYEHAKKLIIFLNENNVPVQLTSISAPEHKFEGLTQIFQKAYEHEQHISESINNIVDHAIKSKDHATFNFLQWYVAEQHEEEVLFKDILDKIELIGNENHGLYLADQYVKGIAKSRKSGS

SEQ ID NO: 266 - protein, 1501 aa, synthetic construct
NITNFCPFDKVFNATRFPNVYAWQRTKISDCIADYTVLYNSTSFSTFKCYGVSPSKLIDLCFTSVYADTFLIRFSEVRQIAPGETGVIADYNYKLPDDFTGCVLAWNTAQQDIGSYFYRSHRAVKLKPFERDLSSDENGVRTLSTYDFNPNVPLDYQATRVVVLSFELLNAPATVCGPGSGGSGSSQCVNLTTRTQLPPAYTNSFTRGVYYPDKVFRSSVLHSTQDLFLPFFSNVTWFHAIHVSGTNGTKRFDNPVLPFNDGVYFASTEKSNIIRGWIFGTTLDSKTQSLLIVNNATNVVIKVCEFQFCNDPFLGVYYHKNNKSWMESEFRVYSSANNCTFEYVSQPFLMDLEGKQGNFKNLREFVFKNIDGYFKIYSKHTPINLVRDLPQGFSALEPLVDLPIGINITRFQTLLALHRSYLTPGDSSSGWTAGAAAYYVGYLQPRTFLLKYNENGTITDAVDCALDPLSETKCTLKSFTVEKGIYQTSNFRVQPTESIVRFPNITNLCPFGEVFNATKFPSVYAWERKKISNCVADYSVLYNSTFFSTFKCYGVSATKLNDLCFSNVYADSFVVKGDDVRQIAPGQTGVIADYNYKLPDDFMGCVLAWNTRNIDATSTGNYNYKYRYLRHGKLRPFERDISNVPFSPDGKPCTPPALNCYWPLNDYGFYTTTGIGYQPYRVVVLSFELLNAPATVCGPKKSTNLVKNKCVNFNFNGLTGTGVLTESNKKFLPFQQFGRDIADTTDAVRDPQTLEILDITPCSFGGVSVITPGTNTSNQVAVLYQDVNCTEVPVAIHADQLTPTWRVYSTGSNVFQTRAGCLIGAEHVNNSYECDIPIGAGICASYQTQTNSPGSASSVASQSIIAYTMSLGAENSVAYSNNSIAIPTNFTISVTTEILPVSMTKTSVDCTMYICGDSTECSNLLLQYGSFCTQLNRALTGIAVEQDKNTQEVFAQVKQIYKTPPIKDFGGFNFSQILPDPSKPSKRSFIEDLLFNKVTLADAGFIKQYGDCLGDIAARDLICAQKFNGLTVLPPLLTDEMIAQYTSALLAGTITSGWTFGAGAALQIPFAMQMAYRFNGIGVTQNVLYENQKLIANQFNSAIGKIQDSLSSTASALGKLQDVVNQNAQALNTLVKQLSSNFGAISSVLNDILSRLDPPEAEVQIDRLITGRLQSLQTYVTQQLIRAAEIRASANLAATKMSECVLGQSKRVDFCGKGYHLMSFPQSAPHGVVFLHVTYVPAQEKNFTTAPAICHDGKAHFPREGVFVSNGTHWFVTQRNFYEPQIITTDNTFVSGNCDVVIGIVNNTVYDPLQSELDSIKEELDKIHKNGSGGSGDIIKLLNEQVNKEMQSSNLYMSMSSWCYTHSLDGAGLFLFDHAAEEYEHAKKLIIFLNENNVPVQLTSISAPEHKFEGLTQIFQKAYEHEQHISESINNIVDHAIKSKDHATFNFLQWYVAEQHEEEVLFKDILDKIELIGNENHGLYLADQYVKGIAKSRKSGS

SEQ ID NO: 267 - protein, 1501 aa, synthetic construct
NITNFCPFDKVFNATRFPNVYAWQRTKISDCIADYTVLYNSTSFSTFKCYGVSPSKLIDLCFTSVYADTFLIRFSEVRQIAPGETGVIADYNYKLPDDFTGCVLAWNTAQQDIGSYFYRSHRAVKLKPFERDLSSDENGVRTLSTYDFWPNVPLDYQATRVVVLSFELLNAPATVCGPGSGGSGSSQCVNLTTRTQLPPAYTNSFTRGVYYPDKVFRSSVLHSTQDLFLPFFSNVTWFHAIHVSGTNGTKRFDNPVLPFNDGVYFASTEKSNIIRGWIFGTTLDSKTQSLLIVNNATNVVIKVCEFQFCNDPFLGVYYHKNNKSWMESEFRVYSSANNCTFEYVSQPFLMDLEGKQGNFKNLREFVFKNIDGYFKIYSKHTPINLVRDLPQGFSALEPLVDLPIGINITRFQTLLALHRSYLTPGDSSSGWTAGAAAYYVGYLQPRTFLLKYNENGTITDAVDCALDPLSETKCTLKSFTVEKGIYQTSNFRVQPTESIVRFPNITNLCPFGEVFNATKFPSVYAWERKKISNCVADYSVLYNSTFFSTFKCYGVSATKLNDLCFSNVYADSFVVKGDDVRQIAPGQTGVIADYNYKLPDDFMGCVLAWNTRNIDATSTGNYNYKYRYLRHGKLRPFERDISNVPFSPDGKPCTPPALNCYWPLNDYGFYTTTGIGYQPYRVVVLSFELLNAPATVCGPKKSTNLVKNKCVNFNFNGLTGTGVLTESNKKFLPFQQFGRDIADTTDAVRDPQTLEILDITPCSFGGVSVITPGTNTSNQVAVLYQDVNCTEVPVAIHADQLTPTWRVYSTGSNVFQTRAGCLIGAEHVNNSYECDIPIGAGICASYQTQTNSPGSASSVASQSIIAYTMSLGAENSVAYSNNSIAIPTNFTISVTTEILPVSMTKTSVDCTMYICGDSTECSNLLLQYGSFCTQLNRALTGIAVEQDKNTQEVFAQVKQIYKTPPIKDFGGFNFSQILPDPSKPSKRSFIEDLLFNKVTLADAGFIKQYGDCLGDIAARDLICAQKFNGLTVLPPLLTDEMIAQYTSALLAGTITSGWTFGAGAALQIPFAMQMAYRFNGIGVTQNVLYENQKLIANQFNSAIGKIQDSLSSTASALGKLQDVVNQNAQALNTLVKQLSSNFGAISSVLNDILSRLDPPEAEVQIDRLITGRLQSLQTYVTQQLIRAAEIRASANLAATKMSECVLGQSKRVDFCGKGYHLMSFPQSAPHGVVFLHVTYVPAQEKNFTTAPAICHDGKAHFPREGVFVSNGTHWFVTQRNFYEPQIITTDNTFVSGNCDVVIGIVNNTVYDPLQSELDSIKEELDKIHKNGSGGSGDIIKLLNEQVNKEMQSSNLYMSMSSWCYTHSLDGAGLFLFDHAAEEYEHAKKLIIFLNENNVPVQLTSISAPEHKFEGLTQIFQKAYEHEQHISESINNIVDHAIKSKDHATFNFLQWYVAEQHEEEVLFKDILDKIELIGNENHGLYLADQYVKGIAKSRKSGS

SEQ ID NO: 268 - protein, 1501 aa, synthetic construct
NITNFCPFDKVFNATRFPNVYAWQRTKISDCIADYTVLYNSTSFSTFKCYGVSPSKLIDLCFTSVYADTFLIRFSEVRQIAPGETGVIADYNYKLPDDFTGCVLAWNTAQQDIGSYFYRSHRAVKLKPFERDLSSDENGVRTLYTYDFWPNVPLDYQATRVVVLSFELLNAPATVCGPGSGGSGSSQCVNLTTRTQLPPAYTNSFTRGVYYPDKVFRSSVLHSTQDLFLPFFSNVTWFHAIHVSGTNGTKRFDNPVLPFNDGVYFASTEKSNIIRGWIFGTTLDSKTQSLLIVNNATNVVIKVCEFQFCNDPFLGVYYHKNNKSWMESEFRVYSSANNCTFEYVSQPFLMDLEGKQGNFKNLREFVFKNIDGYFKIYSKHTPINLVRDLPQGFSALEPLVDLPIGINITRFQTLLALHRSYLTPGDSSSGWTAGAAAYYVGYLQPRTFLLKYNENGTITDAVDCALDPLSETKCTLKSFTVEKGIYQTSNFRVQPTESIVRFPNITNLCPFGEVFNATKFPSVYAWERKKISNCVADYSVLYNSTFFSTFKCYGVSATKLNDLCFSNVYADSFVVKGDDVRQIAPGQTGVIADYNYKLPDDFMGCVLAWNTRNIDATSTGNYNYKYRYLRHGKLRPFERDISNVPFSPDGKPCTPPALNCYWPLNDYGFYTTTGIGYQPYRVVVLSFELLNAPATVCGPKKSTNLVKNKCVNFNFNGLTGTGVLTESNKKFLPFQQFGRDIADTTDAVRDPQTLEILDITPCSFGGVSVITPGTNTSNQVAVLYQDVNCTEVPVAIHADQLTPTWRVYSTGSNVFQTRAGCLIGAEHVNNSYECDIPIGAGICASYQTQTNSPGSASSVASQSIIAYTMSLGAENSVAYSNNSIAIPTNFTISVTTEILPVSMTKTSVDCTMYICGDSTECSNLLLQYGSFCTQLNRALTGIAVEQDKNTQEVFAQVKQIYKTPPIKDFGGFNFSQILPDPSKPSKRSFIEDLLFNKVTLADAGFIKQYGDCLGDIAARDLICAQKFNGLTVLPPLLTDEMIAQYTSALLAGTITSGWTFGAGAALQIPFAMQMAYRFNGIGVTQNVLYENQKLIANQFNSAIGKIQDSLSSTASALGKLQDVVNQNAQALNTLVKQLSSNFGAISSVLNDILSRLDPPEAEVQIDRLITGRLQSLQTYVTQQLIRAAEIRASANLAATKMSECVLGQSKRVDFCGKGYHLMSFPQSAPHGVVFLHVTYVPAQEKNFTTAPAICHDGKAHFPREGVFVSNGTHWFVTQRNFYEPQIITTDNTFVSGNCDVVIGIVNNTVYDPLQSELDSIKEELDKIHKNGSGGSGDIIKLLNEQVNKEMQSSNLYMSMSSWCYTHSLDGAGLFLFDHAAEEYEHAKKLIIFLNENNVPVQLTSISAPEHKFEGLTQIFQKAYEHEQHISESINNIVDHAIKSKDHATFNFLQWYVAEQHEEEVLFKDILDKIELIGNENHGLYLADQYVKGIAKSRKSGS

SEQ ID NO: 269 - protein, 1501 aa, synthetic construct
NITNLCPFDAVFNATRFPSVYAWERVKISNCVADYTAFYNSTSFSTFKCYGVSPSKLIDLCFTSVYADTFLIRFSEVRQVAPGETGVIADYNYKLPDDFTGCVIAWNTAKQDVGSYFYRSHRSSKLKPFERDLSSDENGVRTLSTYDFNPNVPLDYQATRVVVLSFELLNAPATVCGPGSGGSGSSQCVNLTTRTQLPPAYTNSFTRGVYYPDKVFRSSVLHSTQDLFLPFFSNVTWFHAIHVSGTNGTKRFDNPVLPFNDGVYFASTEKSNIIRGWIFGTTLDSKTQSLLIVNNATNVVIKVCEFQFCNDPFLGVYYHKNNKSWMESEFRVYSSANNCTFEYVSQPFLMDLEGKQGNFKNLREFVFKNIDGYFKIYSKHTPINLVRDLPQGFSALEPLVDLPIGINITRFQTLLALHRSYLTPGDSSSGWTAGAAAYYVGYLQPRTFLLKYNENGTITDAVDCALDPLSETKCTLKSFTVEKGIYQTSNFRVQPTESIVRFPNITNLCPFGEVFNATKFPSVYAWERKKISNCVADYSVLYNSTFFSTFKCYGVSATKLNDLCFSNVYADSFVVKGDDVRQIAPGQTGVIADYNYKLPDDFMGCVLAWNTRNIDATSTGNYNYKYRYLRHGKLRPFERDISNVPFSPDGKPCTPPALNCYWPLNDYGFYTTTGIGYQPYRVVVLSFELLNAPATVCGPKKSTNLVKNKCVNFNFNGLTGTGVLTESNKKFLPFQQFGRDIADTTDAVRDPQTLEILDITPCSFGGVSVITPGTNTSNQVAVLYQDVNCTEVPVAIHADQLTPTWRVYSTGSNVFQTRAGCLIGAEHVNNSYECDIPIGAGICASYQTQTNSPGSASSVASQSIIAYTMSLGAENSVAYSNNSIAIPTNFTISVTTEILPVSMTKTSVDCTMYICGDSTECSNLLLQYGSFCTQLNRALTGIAVEQDKNTQEVFAQVKQIYKTPPIKDFGGFNFSQILPDPSKPSKRSFIEDLLFNKVTLADAGFIKQYGDCLGDIAARDLICAQKFNGLTVLPPLLTDEMIAQYTSALLAGTITSGWTFGAGAALQIPFAMQMAYRFNGIGVTQNVLYENQKLIANQFNSAIGKIQDSLSSTASALGKLQDVVNQNAQALNTLVKQLSSNFGAISSVLNDILSRLDPPEAEVQIDRLITGRLQSLQTYVTQQLIRAAEIRASANLAATKMSECVLGQSKRVDFCGKGYHLMSFPQSAPHGVVFLHVTYVPAQEKNFTTAPAICHDGKAHFPREGVFVSNGTHWFVTQRNFYEPQIITTDNTFVSGNCDVVIGIVNNTVYDPLQSELDSIKEELDKIHKNGSGGSGDIIKLLNEQVNKEMQSSNLYMSMSSWCYTHSLDGAGLFLFDHAAEEYEHAKKLIIFLNENNVPVQLTSISAPEHKFEGLTQIFQKAYEHEQHISESINNIVDHAIKSKDHATFNFLQWYVAEQHEEEVLFKDILDKIELIGNENHGLYLADQYVKGIAKSRKSGS

SEQ ID NO: 270 - protein, 1501 aa, synthetic construct
NITNRCPFDKVFNATRFPSVYAWERTKISDCVADYTVLYNSTSFSTFKCYGVSPSKLIDLCFTSVYADTFLIRSSEVRQVAPGETGVIADYNYKLPDDFTGCVIAWNTANQDQGQYYYRSSRKEKLKPFERDLSSDENGVYTLSTYDFYPSVPLDYQATRVVVLSFELLNAPATVCGPGSGGSGSSQCVNLTTRTQLPPAYTNSFTRGVYYPDKVFRSSVLHSTQDLFLPFFSNVTWFHAIHVSGTNGTKRFDNPVLPFNDGVYFASTEKSNIIRGWIFGTTLDSKTQSLLIVNNATNVVIKVCEFQFCNDPFLGVYYHKNNKSWMESEFRVYSSANNCTFEYVSQPFLMDLEGKQGNFKNLREFVFKNIDGYFKIYSKHTPINLVRDLPQGFSALEPLVDLPIGINITRFQTLLALHRSYLTPGDSSSGWTAGAAAYYVGYLQPRTFLLKYNENGTITDAVDCALDPLSETKCTLKSFTVEKGIYQTSNFRVQPTESIVRFPNITNLCPFGEVFNATKFPSVYAWERKKISNCVADYSVLYNSTFFSTFKCYGVSATKLNDLCFSNVYADSFVVKGDDVRQIAPGQTGVIADYNYKLPDDFMGCVLAWNTRNIDATSTGNYNYKYRYLRHGKLRPFERDISNVPFSPDGKPCTPPALNCYWPLNDYGFYTTTGIGYQPYRVVVLSFELLNAPATVCGPKKSTNLVKNKCVNFNFNGLTGTGVLTESNKKFLPFQQFGRDIADTTDAVRDPQTLEILDITPCSFGGVSVITPGTNTSNQVAVLYQDVNCTEVPVAIHADQLTPTWRVYSTGSNVFQTRAGCLIGAEHVNNSYECDIPIGAGICASYQTQTNSPGSASSVASQSIIAYTMSLGAENSVAYSNNSIAIPTNFTISVTTEILPVSMTKTSVDCTMYICGDSTECSNLLLQYGSFCTQLNRALTGIAVEQDKNTQEVFAQVKQIYKTPPIKDFGGFNFSQILPDPSKPSKRSFIEDLLFNKVTLADAGFIKQYGDCLGDIAARDLICAQKFNGLTVLPPLLTDEMIAQYTSALLAGTITSGWTFGAGAALQIPFAMQMAYRFNGIGVTQNVLYENQKLIANQFNSAIGKIQDSLSSTASALGKLQDVVNQNAQALNTLVKQLSSNFGAISSVLNDILSRLDPPEAEVQIDRLITGRLQSLQTYVTQQLIRAAEIRASANLAATKMSECVLGQSKRVDFCGKGYHLMSFPQSAPHGVVFLHVTYVPAQEKNFTTAPAICHDGKAHFPREGVFVSNGTHWFVTQRNFYEPQIITTDNTFVSGNCDVVIGIVNNTVYDPLQSELDSIKEELDKIHKNGSGGSGDIIKLLNEQVNKEMQSSNLYMSMSSWCYTHSLDGAGLFLFDHAAEEYEHAKKLIIFLNENNVPVQLTSISAPEHKFEGLTQIFQKAYEHEQHISESINNIVDHAIKSKDHATFNFLQWYVAEQHEEEVLFKDILDKIELIGNENHGLYLADQYVKGIAKSRKSGS

SEQ ID NO: 271 - protein, 1501 aa, synthetic construct
NITNLCPFDKVFNATRFPSVYAWERTKISDCVADYTVFYNSTSFSTFNCYGVSPSKLIDLCFTSVYADTFLIRFSEVRQVAPGQTGVIADYNYKLPDDFTGCVIAWNTAKQDVGSYFYRSHRSSKLKPFERDLSSEENGVRTLSTYDFNQYVPLEYQATRVVVLSFELLNAPATVCGPGSGGSGSSQCVNLTTRTQLPPAYTNSFTRGVYYPDKVFRSSVLHSTQDLFLPFFSNVTWFHAIHVSGTNGTKRFDNPVLPFNDGVYFASTEKSNIIRGWIFGTTLDSKTQSLLIVNNATNVVIKVCEFQFCNDPFLGVYYHKNNKSWMESEFRVYSSANNCTFEYVSQPFLMDLEGKQGNFKNLREFVFKNIDGYFKIYSKHTPINLVRDLPQGFSALEPLVDLPIGINITRFQTLLALHRSYLTPGDSSSGWTAGAAAYYVGYLQPRTFLLKYNENGTITDAVDCALDPLSETKCTLKSFTVEKGIYQTSNFRVQPTESIVRFPNITNLCPFGEVFNATKFPSVYAWERKKISNCVADYSVLYNSTFFSTFKCYGVSATKLNDLCFSNVYADSFVVKGDDVRQIAPGQTGVIADYNYKLPDDFMGCVLAWNTRNIDATSTGNYNYKYRYLRHGKLRPFERDISNVPFSPDGKPCTPPALNCYWPLNDYGFYTTTGIGYQPYRVVVLSFELLNAPATVCGPKKSTNLVKNKCVNFNFNGLTGTGVLTESNKKFLPFQQFGRDIADTTDAVRDPQTLEILDITPCSFGGVSVITPGTNTSNQVAVLYQDVNCTEVPVAIHADQLTPTWRVYSTGSNVFQTRAGCLIGAEHVNNSYECDIPIGAGICASYQTQTNSPGSASSVASQSIIAYTMSLGAENSVAYSNNSIAIPTNFTISVTTEILPVSMTKTSVDCTMYICGDSTECSNLLLQYGSFCTQLNRALTGIAVEQDKNTQEVFAQVKQIYKTPPIKDFGGFNFSQILPDPSKPSKRSFIEDLLFNKVTLADAGFIKQYGDCLGDIAARDLICAQKFNGLTVLPPLLTDEMIAQYTSALLAGTITSGWTFGAGAALQIPFAMQMAYRFNGIGVTQNVLYENQKLIANQFNSAIGKIQDSLSSTASALGKLQDVVNQNAQALNTLVKQLSSNFGAISSVLNDILSRLDPPEAEVQIDRLITGRLQSLQTYVTQQLIRAAEIRASANLAATKMSECVLGQSKRVDFCGKGYHLMSFPQSAPHGVVFLHVTYVPAQEKNFTTAPAICHDGKAHFPREGVFVSNGTHWFVTQRNFYEPQIITTDNTFVSGNCDVVIGIVNNTVYDPLQSELDSIKEELDKIHKNGSGGSGDIIKLLNEQVNKEMQSSNLYMSMSSWCYTHSLDGAGLFLFDHAAEEYEHAKKLIIFLNENNVPVQLTSISAPEHKFEGLTQIFQKAYEHEQHISESINNIVDHAIKSKDHATFNFLQWYVAEQHEEEVLFKDILDKIELIGNENHGLYLADQYVKGIAKSRKSGS

SEQ ID NO: 272 - protein, 1501 aa, synthetic construct
NITNRCPFDKVFNATRFPNVYAWERTKISDCVADYTVLYNSTSFSTFKCYGVSPSKLIDLCFTSVYADTFLIRSSEVRQVAPGETGVIADYNYKLPDDFTGCVIAWNTAKQDQGQYYYRSHRKTKLKPFERDLSSDENGVRTLSTYDFYPSVPVAYQATRVVVLSFELLNAPATVCGPGSGGSGSSQCVNLTTRTQLPPAYTNSFTRGVYYPDKVFRSSVLHSTQDLFLPFFSNVTWFHAIHVSGTNGTKRFDNPVLPFNDGVYFASTEKSNIIRGWIFGTTLDSKTQSLLIVNNATNVVIKVCEFQFCNDPFLGVYYHKNNKSWMESEFRVYSSANNCTFEYVSQPFLMDLEGKQGNFKNLREFVFKNIDGYFKIYSKHTPINLVRDLPQGFSALEPLVDLPIGINITRFQTLLALHRSYLTPGDSSSGWTAGAAAYYVGYLQPRTFLLKYNENGTITDAVDCALDPLSETKCTLKSFTVEKGIYQTSNFRVQPTESIVRFPNITNLCPFGEVFNATKFPSVYAWERKKISNCVADYSVLYNSTFFSTFKCYGVSATKLNDLCFSNVYADSFVVKGDDVRQIAPGQTGVIADYNYKLPDDFMGCVLAWNTRNIDATSTGNYNYKYRYLRHGKLRPFERDISNVPFSPDGKPCTPPALNCYWPLNDYGFYTTTGIGYQPYRVVVLSFELLNAPATVCGPKKSTNLVKNKCVNFNFNGLTGTGVLTESNKKFLPFQQFGRDIADTTDAVRDPQTLEILDITPCSFGGVSVITPGTNTSNQVAVLYQDVNCTEVPVAIHADQLTPTWRVYSTGSNVFQTRAGCLIGAEHVNNSYECDIPIGAGICASYQTQTNSPGSASSVASQSIIAYTMSLGAENSVAYSNNSIAIPTNFTISVTTEILPVSMTKTSVDCTMYICGDSTECSNLLLQYGSFCTQLNRALTGIAVEQDKNTQEVFAQVKQIYKTPPIKDFGGFNFSQILPDPSKPSKRSFIEDLLFNKVTLADAGFIKQYGDCLGDIAARDLICAQKFNGLTVLPPLLTDEMIAQYTSALLAGTITSGWTFGAGAALQIPFAMQMAYRFNGIGVTQNVLYENQKLIANQFNSAIGKIQDSLSSTASALGKLQDVVNQNAQALNTLVKQLSSNFGAISSVLNDILSRLDPPEAEVQIDRLITGRLQSLQTYVTQQLIRAAEIRASANLAATKMSECVLGQSKRVDFCGKGYHLMSFPQSAPHGVVFLHVTYVPAQEKNFTTAPAICHDGKAHFPREGVFVSNGTHWFVTQRNFYEPQIITTDNTFVSGNCDVVIGIVNNTVYDPLQSELDSIKEELDKIHKNGSGGSGDIIKLLNEQVNKEMQSSNLYMSMSSWCYTHSLDGAGLFLFDHAAEEYEHAKKLIIFLNENNVPVQLTSISAPEHKFEGLTQIFQKAYEHEQHISESINNIVDHAIKSKDHATFNFLQWYVAEQHEEEVLFKDILDKIELIGNENHGLYLADQYVKGIAKSRKSGS

SEQ ID NO: 273 - protein, 1501 aa, synthetic construct
NITNRCPFDKVFNASRFPNVYAWERTKISDCVADYTVLYNSTSFSTFKCYGVSPSKLIDLCFTSVYADTFLIRSSEVRQVAPGETGVIADYNYKLPDDFTGCVIAWNTAKQDQGQYYYRSSRKTKLKPFERDLTSDENGVRTLSTYDFYPNVPIEYQATRVVVLSFELLNAPATVCGPGSGGSGSSQCVNLTTRTQLPPAYTNSFTRGVYYPDKVFRSSVLHSTQDLFLPFFSNVTWFHAIHVSGTNGTKRFDNPVLPFNDGVYFASTEKSNIIRGWIFGTTLDSKTQSLLIVNNATNVVIKVCEFQFCNDPFLGVYYHKNNKSWMESEFRVYSSANNCTFEYVSQPFLMDLEGKQGNFKNLREFVFKNIDGYFKIYSKHTPINLVRDLPQGFSALEPLVDLPIGINITRFQTLLALHRSYLTPGDSSSGWTAGAAAYYVGYLQPRTFLLKYNENGTITDAVDCALDPLSETKCTLKSFTVEKGIYQTSNFRVQPTESIVRFPNITNLCPFGEVFNATKFPSVYAWERKKISNCVADYSVLYNSTFFSTFKCYGVSATKLNDLCFSNVYADSFVVKGDDVRQIAPGQTGVIADYNYKLPDDFMGCVLAWNTRNIDATSTGNYNYKYRYLRHGKLRPFERDISNVPFSPDGKPCTPPALNCYWPLNDYGFYTTTGIGYQPYRVVVLSFELLNAPATVCGPKKSTNLVKNKCVNFNFNGLTGTGVLTESNKKFLPFQQFGRDIADTTDAVRDPQTLEILDITPCSFGGVSVITPGTNTSNQVAVLYQDVNCTEVPVAIHADQLTPTWRVYSTGSNVFQTRAGCLIGAEHVNNSYECDIPIGAGICASYQTQTNSPGSASSVASQSIIAYTMSLGAENSVAYSNNSIAIPTNFTISVTTEILPVSMTKTSVDCTMYICGDSTECSNLLLQYGSFCTQLNRALTGIAVEQDKNTQEVFAQVKQIYKTPPIKDFGGFNFSQILPDPSKPSKRSFIEDLLFNKVTLADAGFIKQYGDCLGDIAARDLICAQKFNGLTVLPPLLTDEMIAQYTSALLAGTITSGWTFGAGAALQIPFAMQMAYRFNGIGVTQNVLYENQKLIANQFNSAIGKIQDSLSSTASALGKLQDVVNQNAQALNTLVKQLSSNFGAISSVLNDILSRLDPPEAEVQIDRLITGRLQSLQTYVTQQLIRAAEIRASANLAATKMSECVLGQSKRVDFCGKGYHLMSFPQSAPHGVVFLHVTYVPAQEKNFTTAPAICHDGKAHFPREGVFVSNGTHWFVTQRNFYEPQIITTDNTFVSGNCDVVIGIVNNTVYDPLQSELDSIKEELDKIHKNGSGGSGDIIKLLNEQVNKEMQSSNLYMSMSSWCYTHSLDGAGLFLFDHAAEEYEHAKKLIIFLNENNVPVQLTSISAPEHKFEGLTQIFQKAYEHEQHISESINNIVDHAIKSKDHATFNFLQWYVAEQHEEEVLFKDILDKIELIGNENHGLYLADQYVKGIAKSRKSGS

SEQ ID NO: 274 - protein, 1516 aa, synthetic construct
NITNLCPFSQVFNATRFPSVYAWTRERISNCIADYSVLYNSTSFSTFRCYGVSPTKLNDLCFSNVYADSMVVRGDEVRQIAPSQTGVIADYNYKLPDDFTGCVIAWNSKAKDENGQYFYRLFRKSKLLPFQRDVSNVTYGSGKNDGCNPSEADCYWPLLKYGFTSSVSQDYQPYRVVVLSFELLNAPATVCGPGSGGSGSSQCVNLTTRTQLPPAYTNSFTRGVYYPDKVFRSSVLHSTQDLFLPFFSNVTWFHAIHVSGTNGTKRFDNPVLPFNDGVYFASTEKSNIIRGWIFGTTLDSKTQSLLIVNNATNVVIKVCEFQFCNDPFLGVYYHKNNKSWMESEFRVYSSANNCTFEYVSQPFLMDLEGKQGNFKNLREFVFKNIDGYFKIYSKHTPINLVRDLPQGFSALEPLVDLPIGINITRFQTLLALHRSYLTPGDSSSGWTAGAAAYYVGYLQPRTFLLKYNENGTITDAVDCALDPLSETKCTLKSFTVEKGIYQTSNFRVQPTESIVRFPNITNLCPFGEVFNATKFPSVYAWERKKISNCVADYSVLYNSTFFSTFKCYGVSATKLNDLCFSNVYADSFVVKGDDVRQIAPGQTGVIADYNYKLPDDFMGCVLAWNTRNIDATSTGNYNYKYRYLRHGKLRPFERDISNVPFSPDGKPCTPPALNCYWPLNDYGFYTTTGIGYQPYRVVVLSFELLNAPATVCGPKKSTNLVKNKCVNFNFNGLTGTGVLTESNKKFLPFQQFGRDIADTTDAVRDPQTLEILDITPCSFGGVSVITPGTNTSNQVAVLYQDVNCTEVPVAIHADQLTPTWRVYSTGSNVFQTRAGCLIGAEHVNNSYECDIPIGAGICASYQTQTNSPGSASSVASQSIIAYTMSLGAENSVAYSNNSIAIPTNFTISVTTEILPVSMTKTSVDCTMYICGDSTECSNLLLQYGSFCTQLNRALTGIAVEQDKNTQEVFAQVKQIYKTPPIKDFGGFNFSQILPDPSKPSKRSFIEDLLFNKVTLADAGFIKQYGDCLGDIAARDLICAQKFNGLTVLPPLLTDEMIAQYTSALLAGTITSGWTFGAGAALQIPFAMQMAYRFNGIGVTQNVLYENQKLIANQFNSAIGKIQDSLSSTASALGKLQDVVNQNAQALNTLVKQLSSNFGAISSVLNDILSRLDPPEAEVQIDRLITGRLQSLQTYVTQQLIRAAEIRASANLAATKMSECVLGQSKRVDFCGKGYHLMSFPQSAPHGVVFLHVTYVPAQEKNFTTAPAICHDGKAHFPREGVFVSNGTHWFVTQRNFYEPQIITTDNTFVSGNCDVVIGIVNNTVYDPLQSELDSIKEELDKIHKNGSGGSGDIIKLLNEQVNKEMQSSNLYMSMSSWCYTHSLDGAGLFLFDHAAEEYEHAKKLIIFLNENNVPVQLTSISAPEHKFEGLTQIFQKAYEHEQHISESINNIVDHAIKSKDHATFNFLQWYVAEQHEEEVLFKDILDKIELIGNENHGLYLADQYVKGIAKSRKSGS

SEQ ID NO: 275 - protein, 1516 aa, synthetic construct
NITNLCPFSQVFNATRFPSVYAWTRERISNCIADYSVLYNSTSFSTFRCYGVSPTKLNDLCFSNVYADSMVVRGDEVRQIAPSQTGVIADYNYKLPDDFTGCVIAWNSKAKDENGQYFYRLFRKSKLLPFQRDVSNVTYGSGKNDGCNPSEADCYWPLLKYGFWSSVSQDYQPYRVVVLSFELLNAPATVCGPGSGGSGSSQCVNLTTRTQLPPAYTNSFTRGVYYPDKVFRSSVLHSTQDLFLPFFSNVTWFHAIHVSGTNGTKRFDNPVLPFNDGVYFASTEKSNIIRGWIFGTTLDSKTQSLLIVNNATNVVIKVCEFQFCNDPFLGVYYHKNNKSWMESEFRVYSSANNCTFEYVSQPFLMDLEGKQGNFKNLREFVFKNIDGYFKIYSKHTPINLVRDLPQGFSALEPLVDLPIGINITRFQTLLALHRSYLTPGDSSSGWTAGAAAYYVGYLQPRTFLLKYNENGTITDAVDCALDPLSETKCTLKSFTVEKGIYQTSNFRVQPTESIVRFPNITNLCPFGEVFNATKFPSVYAWERKKISNCVADYSVLYNSTFFSTFKCYGVSATKLNDLCFSNVYADSFVVKGDDVRQIAPGQTGVIADYNYKLPDDFMGCVLAWNTRNIDATSTGNYNYKYRYLRHGKLRPFERDISNVPFSPDGKPCTPPALNCYWPLNDYGFYTTTGIGYQPYRVVVLSFELLNAPATVCGPKKSTNLVKNKCVNFNFNGLTGTGVLTESNKKFLPFQQFGRDIADTTDAVRDPQTLEILDITPCSFGGVSVITPGTNTSNQVAVLYQDVNCTEVPVAIHADQLTPTWRVYSTGSNVFQTRAGCLIGAEHVNNSYECDIPIGAGICASYQTQTNSPGSASSVASQSIIAYTMSLGAENSVAYSNNSIAIPTNFTISVTTEILPVSMTKTSVDCTMYICGDSTECSNLLLQYGSFCTQLNRALTGIAVEQDKNTQEVFAQVKQIYKTPPIKDFGGFNFSQILPDPSKPSKRSFIEDLLFNKVTLADAGFIKQYGDCLGDIAARDLICAQKFNGLTVLPPLLTDEMIAQYTSALLAGTITSGWTFGAGAALQIPFAMQMAYRFNGIGVTQNVLYENQKLIANQFNSAIGKIQDSLSSTASALGKLQDVVNQNAQALNTLVKQLSSNFGAISSVLNDILSRLDPPEAEVQIDRLITGRLQSLQTYVTQQLIRAAEIRASANLAATKMSECVLGQSKRVDFCGKGYHLMSFPQSAPHGVVFLHVTYVPAQEKNFTTAPAICHDGKAHFPREGVFVSNGTHWFVTQRNFYEPQIITTDNTFVSGNCDVVIGIVNNTVYDPLQSELDSIKEELDKIHKNGSGGSGDIIKLLNEQVNKEMQSSNLYMSMSSWCYTHSLDGAGLFLFDHAAEEYEHAKKLIIFLNENNVPVQLTSISAPEHKFEGLTQIFQKAYEHEQHISESINNIVDHAIKSKDHATFNFLQWYVAEQHEEEVLFKDILDKIELIGNENHGLYLADQYVKGIAKSRKSGS

SEQ ID NO: 276 - protein, 1516 aa, synthetic construct
NITNLCPFSQVFNATRFPSVYAWTRERISNCIADYSVLYNSTSFSTFRCYGVSPTKLNDLCFSNVYADSMVVRGDEVRQIAPSQTGVIADYNYKLPDDFTGCVIAWNSKAKDENGQYFYRLFRKSKLLPFQRDVSNVTYGSGKNDGCNPSEADCYWPLYKYGFWSSVSQDYQPYRVVVLSFELLNAPATVCGPGSGGSGSSQCVNLTTRTQLPPAYTNSFTRGVYYPDKVFRSSVLHSTQDLFLPFFSNVTWFHAIHVSGTNGTKRFDNPVLPFNDGVYFASTEKSNIIRGWIFGTTLDSKTQSLLIVNNATNVVIKVCEFQFCNDPFLGVYYHKNNKSWMESEFRVYSSANNCTFEYVSQPFLMDLEGKQGNFKNLREFVFKNIDGYFKIYSKHTPINLVRDLPQGFSALEPLVDLPIGINITRFQTLLALHRSYLTPGDSSSGWTAGAAAYYVGYLQPRTFLLKYNENGTITDAVDCALDPLSETKCTLKSFTVEKGIYQTSNFRVQPTESIVRFPNITNLCPFGEVFNATKFPSVYAWERKKISNCVADYSVLYNSTFFSTFKCYGVSATKLNDLCFSNVYADSFVVKGDDVRQIAPGQTGVIADYNYKLPDDFMGCVLAWNTRNIDATSTGNYNYKYRYLRHGKLRPFERDISNVPFSPDGKPCTPPALNCYWPLNDYGFYTTTGIGYQPYRVVVLSFELLNAPATVCGPKKSTNLVKNKCVNFNFNGLTGTGVLTESNKKFLPFQQFGRDIADTTDAVRDPQTLEILDITPCSFGGVSVITPGTNTSNQVAVLYQDVNCTEVPVAIHADQLTPTWRVYSTGSNVFQTRAGCLIGAEHVNNSYECDIPIGAGICASYQTQTNSPGSASSVASQSIIAYTMSLGAENSVAYSNNSIAIPTNFTISVTTEILPVSMTKTSVDCTMYICGDSTECSNLLLQYGSFCTQLNRALTGIAVEQDKNTQEVFAQVKQIYKTPPIKDFGGFNFSQILPDPSKPSKRSFIEDLLFNKVTLADAGFIKQYGDCLGDIAARDLICAQKFNGLTVLPPLLTDEMIAQYTSALLAGTITSGWTFGAGAALQIPFAMQMAYRFNGIGVTQNVLYENQKLIANQFNSAIGKIQDSLSSTASALGKLQDVVNQNAQALNTLVKQLSSNFGAISSVLNDILSRLDPPEAEVQIDRLITGRLQSLQTYVTQQLIRAAEIRASANLAATKMSECVLGQSKRVDFCGKGYHLMSFPQSAPHGVVFLHVTYVPAQEKNFTTAPAICHDGKAHFPREGVFVSNGTHWFVTQRNFYEPQIITTDNTFVSGNCDVVIGIVNNTVYDPLQSELDSIKEELDKIHKNGSGGSGDIIKLLNEQVNKEMQSSNLYMSMSSWCYTHSLDGAGLFLFDHAAEEYEHAKKLIIFLNENNVPVQLTSISAPEHKFEGLTQIFQKAYEHEQHISESINNIVDHAIKSKDHATFNFLQWYVAEQHEEEVLFKDILDKIELIGNENHGLYLADQYVKGIAKSRKSGS

SEQ ID NO: 277 - protein, 1517 aa, synthetic construct
NMTNICPFDQVFNKTQFPSVYAWERVRISDCVSDYTVLYNSSASFSTFKCYGVSPTKLNDLCFSGVYADYFVVKGDHVHQIAPGQTGVIADYNYKLPSEFVGCILAWNTRTIDSKRGFYYRLFRHGNIRPYERDTSNVPYNAAGGTCNQPGTHNCYEPLQDYGFTSTSGVGYQPFRVVVLSFELLNAPATVCGPGSGGSGSSQCVNLTTRTQLPPAYTNSFTRGVYYPDKVFRSSVLHSTQDLFLPFFSNVTWFHAIHVSGTNGTKRFDNPVLPFNDGVYFASTEKSNIIRGWIFGTTLDSKTQSLLIVNNATNVVIKVCEFQFCNDPFLGVYYHKNNKSWMESEFRVYSSANNCTFEYVSQPFLMDLEGKQGNFKNLREFVFKNIDGYFKIYSKHTPINLVRDLPQGFSALEPLVDLPIGINITRFQTLLALHRSYLTPGDSSSGWTAGAAAYYVGYLQPRTFLLKYNENGTITDAVDCALDPLSETKCTLKSFTVEKGIYQTSNFRVQPTESIVRFPNITNLCPFGEVFNATKFPSVYAWERKKISNCVADYSVLYNSTFFSTFKCYGVSATKLNDLCFSNVYADSFVVKGDDVRQIAPGQTGVIADYNYKLPDDFMGCVLAWNTRNIDATSTGNYNYKYRYLRHGKLRPFERDISNVPFSPDGKPCTPPALNCYWPLNDYGFYTTTGIGYQPYRVVVLSFELLNAPATVCGPKKSTNLVKNKCVNFNFNGLTGTGVLTESNKKFLPFQQFGRDIADTTDAVRDPQTLEILDITPCSFGGVSVITPGTNTSNQVAVLYQDVNCTEVPVAIHADQLTPTWRVYSTGSNVFQTRAGCLIGAEHVNNSYECDIPIGAGICASYQTQTNSPGSASSVASQSIIAYTMSLGAENSVAYSNNSIAIPTNFTISVTTEILPVSMTKTSVDCTMYICGDSTECSNLLLQYGSFCTQLNRALTGIAVEQDKNTQEVFAQVKQIYKTPPIKDFGGFNFSQILPDPSKPSKRSFIEDLLFNKVTLADAGFIKQYGDCLGDIAARDLICAQKFNGLTVLPPLLTDEMIAQYTSALLAGTITSGWTFGAGAALQIPFAMQMAYRFNGIGVTQNVLYENQKLIANQFNSAIGKIQDSLSSTASALGKLQDVVNQNAQALNTLVKQLSSNFGAISSVLNDILSRLDPPEAEVQIDRLITGRLQSLQTYVTQQLIRAAEIRASANLAATKMSECVLGQSKRVDFCGKGYHLMSFPQSAPHGVVFLHVTYVPAQEKNFTTAPAICHDGKAHFPREGVFVSNGTHWFVTQRNFYEPQIITTDNTFVSGNCDVVIGIVNNTVYDPLQSELDSIKEELDKIHKNGSGGSGDIIKLLNEQVNKEMQSSNLYMSMSSWCYTHSLDGAGLFLFDHAAEEYEHAKKLIIFLNENNVPVQLTSISAPEHKFEGLTQIFQKAYEHEQHISESINNIVDHAIKSKDHATFNFLQWYVAEQHEEEVLFKDILDKIELIGNENHGLYLADQYVKGIAKSRKSGS

SEQ ID NO: 278 - protein, 1517 aa, synthetic construct
NMTNICPFDQVFNKTQFPSVYAWERVRISDCVSDYTVLYNSSASFSTFKCYGVSPTKLNDLCFSGVYADYFVVKGDHVHQIAPGQTGVIADYNYKLPSEFVGCILAWNTRTIDSKRGFYYRLFRHGNIRPYERDTSNVPYNAAGGTCNQPGTHNCYEPLQDYGFWSTSGVGYQPFRVVVLSFELLNAPATVCGPGSGGSGSSQCVNLTTRTQLPPAYTNSFTRGVYYPDKVFRSSVLHSTQDLFLPFFSNVTWFHAIHVSGTNGTKRFDNPVLPFNDGVYFASTEKSNIIRGWIFGTTLDSKTQSLLIVNNATNVVIKVCEFQFCNDPFLGVYYHKNNKSWMESEFRVYSSANNCTFEYVSQPFLMDLEGKQGNFKNLREFVFKNIDGYFKIYSKHTPINLVRDLPQGFSALEPLVDLPIGINITRFQTLLALHRSYLTPGDSSSGWTAGAAAYYVGYLQPRTFLLKYNENGTITDAVDCALDPLSETKCTLKSFTVEKGIYQTSNFRVQPTESIVRFPNITNLCPFGEVFNATKFPSVYAWERKKISNCVADYSVLYNSTFFSTFKCYGVSATKLNDLCFSNVYADSFVVKGDDVRQIAPGQTGVIADYNYKLPDDFMGCVLAWNTRNIDATSTGNYNYKYRYLRHGKLRPFERDISNVPFSPDGKPCTPPALNCYWPLNDYGFYTTTGIGYQPYRVVVLSFELLNAPATVCGPKKSTNLVKNKCVNFNFNGLTGTGVLTESNKKFLPFQQFGRDIADTTDAVRDPQTLEILDITPCSFGGVSVITPGTNTSNQVAVLYQDVNCTEVPVAIHADQLTPTWRVYSTGSNVFQTRAGCLIGAEHVNNSYECDIPIGAGICASYQTQTNSPGSASSVASQSIIAYTMSLGAENSVAYSNNSIAIPTNFTISVTTEILPVSMTKTSVDCTMYICGDSTECSNLLLQYGSFCTQLNRALTGIAVEQDKNTQEVFAQVKQIYKTPPIKDFGGFNFSQILPDPSKPSKRSFIEDLLFNKVTLADAGFIKQYGDCLGDIAARDLICAQKFNGLTVLPPLLTDEMIAQYTSALLAGTITSGWTFGAGAALQIPFAMQMAYRFNGIGVTQNVLYENQKLIANQFNSAIGKIQDSLSSTASALGKLQDVVNQNAQALNTLVKQLSSNFGAISSVLNDILSRLDPPEAEVQIDRLITGRLQSLQTYVTQQLIRAAEIRASANLAATKMSECVLGQSKRVDFCGKGYHLMSFPQSAPHGVVFLHVTYVPAQEKNFTTAPAICHDGKAHFPREGVFVSNGTHWFVTQRNFYEPQIITTDNTFVSGNCDVVIGIVNNTVYDPLQSELDSIKEELDKIHKNGSGGSGDIIKLLNEQVNKEMQSSNLYMSMSSWCYTHSLDGAGLFLFDHAAEEYEHAKKLIIFLNENNVPVQLTSISAPEHKFEGLTQIFQKAYEHEQHISESINNIVDHAIKSKDHATFNFLQWYVAEQHEEEVLFKDILDKIELIGNENHGLYLADQYVKGIAKSRKSGS

SEQ ID NO: 279 - protein, 1517 aa, synthetic construct
NMTNICPFDQVFNKTQFPSVYAWERVRISDCVSDYTVLYNSSASFSTFKCYGVSPTKLNDLCFSGVYADYFVVKGDHVHQIAPGQTGVIADYNYKLPSEFVGCILAWNTRTIDSKRGFYYRLFRHGNIRPYERDTSNVPYNAAGGTCNQPGTHNCYEPLYDYGFWSTSGVGYQPFRVVVLSFELLNAPATVCGPGSGGSGSSQCVNLTTRTQLPPAYTNSFTRGVYYPDKVFRSSVLHSTQDLFLPFFSNVTWFHAIHVSGTNGTKRFDNPVLPFNDGVYFASTEKSNIIRGWIFGTTLDSKTQSLLIVNNATNVVIKVCEFQFCNDPFLGVYYHKNNKSWMESEFRVYSSANNCTFEYVSQPFLMDLEGKQGNFKNLREFVFKNIDGYFKIYSKHTPINLVRDLPQGFSALEPLVDLPIGINITRFQTLLALHRSYLTPGDSSSGWTAGAAAYYVGYLQPRTFLLKYNENGTITDAVDCALDPLSETKCTLKSFTVEKGIYQTSNFRVQPTESIVRFPNITNLCPFGEVFNATKFPSVYAWERKKISNCVADYSVLYNSTFFSTFKCYGVSATKLNDLCFSNVYADSFVVKGDDVRQIAPGQTGVIADYNYKLPDDFMGCVLAWNTRNIDATSTGNYNYKYRYLRHGKLRPFERDISNVPFSPDGKPCTPPALNCYWPLNDYGFYTTTGIGYQPYRVVVLSFELLNAPATVCGPKKSTNLVKNKCVNFNFNGLTGTGVLTESNKKFLPFQQFGRDIADTTDAVRDPQTLEILDITPCSFGGVSVITPGTNTSNQVAVLYQDVNCTEVPVAIHADQLTPTWRVYSTGSNVFQTRAGCLIGAEHVNNSYECDIPIGAGICASYQTQTNSPGSASSVASQSIIAYTMSLGAENSVAYSNNSIAIPTNFTISVTTEILPVSMTKTSVDCTMYICGDSTECSNLLLQYGSFCTQLNRALTGIAVEQDKNTQEVFAQVKQIYKTPPIKDFGGFNFSQILPDPSKPSKRSFIEDLLFNKVTLADAGFIKQYGDCLGDIAARDLICAQKFNGLTVLPPLLTDEMIAQYTSALLAGTITSGWTFGAGAALQIPFAMQMAYRFNGIGVTQNVLYENQKLIANQFNSAIGKIQDSLSSTASALGKLQDVVNQNAQALNTLVKQLSSNFGAISSVLNDILSRLDPPEAEVQIDRLITGRLQSLQTYVTQQLIRAAEIRASANLAATKMSECVLGQSKRVDFCGKGYHLMSFPQSAPHGVVFLHVTYVPAQEKNFTTAPAICHDGKAHFPREGVFVSNGTHWFVTQRNFYEPQIITTDNTFVSGNCDVVIGIVNNTVYDPLQSELDSIKEELDKIHKNGSGGSGDIIKLLNEQVNKEMQSSNLYMSMSSWCYTHSLDGAGLFLFDHAAEEYEHAKKLIIFLNENNVPVQLTSISAPEHKFEGLTQIFQKAYEHEQHISESINNIVDHAIKSKDHATFNFLQWYVAEQHEEEVLFKDILDKIELIGNENHGLYLADQYVKGIAKSRKSGS

SEQ ID NO: 280 - protein, 1519 aa, synthetic construct
NITNLCPFGQVFNASNFPSVYAWERLRISDCVADYAVLYNSSSSFSTFKCYGVSPTKLNDLCFSSVYADYFVVKGDDVRQIAPAQTGVIADYNYKLPDDFTGCVLAWNTNSVDSKSGNNFYYRLFRHGKIKPYERDISNVLYNSAGGTCSSISQLGCYEPLKSYGFTPTVGVGYQPYRVVVLSFELLNAPATVCGPGSGGSGSSQCVNLTTRTQLPPAYTNSFTRGVYYPDKVFRSSVLHSTQDLFLPFFSNVTWFHAIHVSGTNGTKRFDNPVLPFNDGVYFASTEKSNIIRGWIFGTTLDSKTQSLLIVNNATNVVIKVCEFQFCNDPFLGVYYHKNNKSWMESEFRVYSSANNCTFEYVSQPFLMDLEGKQGNFKNLREFVFKNIDGYFKIYSKHTPINLVRDLPQGFSALEPLVDLPIGINITRFQTLLALHRSYLTPGDSSSGWTAGAAAYYVGYLQPRTFLLKYNENGTITDAVDCALDPLSETKCTLKSFTVEKGIYQTSNFRVQPTESIVRFPNITNLCPFGEVFNATKFPSVYAWERKKISNCVADYSVLYNSTFFSTFKCYGVSATKLNDLCFSNVYADSFVVKGDDVRQIAPGQTGVIADYNYKLPDDFMGCVLAWNTRNIDATSTGNYNYKYRYLRHGKLRPFERDISNVPFSPDGKPCTPPALNCYWPLNDYGFYTTTGIGYQPYRVVVLSFELLNAPATVCGPKKSTNLVKNKCVNFNFNGLTGTGVLTESNKKFLPFQQFGRDIADTTDAVRDPQTLEILDITPCSFGGVSVITPGTNTSNQVAVLYQDVNCTEVPVAIHADQLTPTWRVYSTGSNVFQTRAGCLIGAEHVNNSYECDIPIGAGICASYQTQTNSPGSASSVASQSIIAYTMSLGAENSVAYSNNSIAIPTNFTISVTTEILPVSMTKTSVDCTMYICGDSTECSNLLLQYGSFCTQLNRALTGIAVEQDKNTQEVFAQVKQIYKTPPIKDFGGFNFSQILPDPSKPSKRSFIEDLLFNKVTLADAGFIKQYGDCLGDIAARDLICAQKFNGLTVLPPLLTDEMIAQYTSALLAGTITSGWTFGAGAALQIPFAMQMAYRFNGIGVTQNVLYENQKLIANQFNSAIGKIQDSLSSTASALGKLQDVVNQNAQALNTLVKQLSSNFGAISSVLNDILSRLDPPEAEVQIDRLITGRLQSLQTYVTQQLIRAAEIRASANLAATKMSECVLGQSKRVDFCGKGYHLMSFPQSAPHGVVFLHVTYVPAQEKNFTTAPAICHDGKAHFPREGVFVSNGTHWFVTQRNFYEPQIITTDNTFVSGNCDVVIGIVNNTVYDPLQSELDSIKEELDKIHKNGSGGSGDIIKLLNEQVNKEMQSSNLYMSMSSWCYTHSLDGAGLFLFDHAAEEYEHAKKLIIFLNENNVPVQLTSISAPEHKFEGLTQIFQKAYEHEQHISESINNIVDHAIKSKDHATFNFLQWYVAEQHEEEVLFKDILDKIELIGNENHGLYLADQYVKGIAKSRKSGS

SEQ ID NO: 281 - protein, 1519 aa, synthetic construct
NITNLCPFGQVFNASNFPSVYAWERLRISDCVADYAVLYNSSSSFSTFKCYGVSPTKLNDLCFSSVYADYFVVKGDDVRQIAPAQTGVIADYNYKLPDDFTGCVLAWNTNSVDSKSGNNFYYRLFRHGKIKPYERDISNVLYNSAGGTCSSISQLGCYEPLKSYGFWPTVGVGYQPYRVVVLSFELLNAPATVCGPGSGGSGSSQCVNLTTRTQLPPAYTNSFTRGVYYPDKVFRSSVLHSTQDLFLPFFSNVTWFHAIHVSGTNGTKRFDNPVLPFNDGVYFASTEKSNIIRGWIFGTTLDSKTQSLLIVNNATNVVIKVCEFQFCNDPFLGVYYHKNNKSWMESEFRVYSSANNCTFEYVSQPFLMDLEGKQGNFKNLREFVFKNIDGYFKIYSKHTPINLVRDLPQGFSALEPLVDLPIGINITRFQTLLALHRSYLTPGDSSSGWTAGAAAYYVGYLQPRTFLLKYNENGTITDAVDCALDPLSETKCTLKSFTVEKGIYQTSNFRVQPTESIVRFPNITNLCPFGEVFNATKFPSVYAWERKKISNCVADYSVLYNSTFFSTFKCYGVSATKLNDLCFSNVYADSFVVKGDDVRQIAPGQTGVIADYNYKLPDDFMGCVLAWNTRNIDATSTGNYNYKYRYLRHGKLRPFERDISNVPFSPDGKPCTPPALNCYWPLNDYGFYTTTGIGYQPYRVVVLSFELLNAPATVCGPKKSTNLVKNKCVNFNFNGLTGTGVLTESNKKFLPFQQFGRDIADTTDAVRDPQTLEILDITPCSFGGVSVITPGTNTSNQVAVLYQDVNCTEVPVAIHADQLTPTWRVYSTGSNVFQTRAGCLIGAEHVNNSYECDIPIGAGICASYQTQTNSPGSASSVASQSIIAYTMSLGAENSVAYSNNSIAIPTNFTISVTTEILPVSMTKTSVDCTMYICGDSTECSNLLLQYGSFCTQLNRALTGIAVEQDKNTQEVFAQVKQIYKTPPIKDFGGFNFSQILPDPSKPSKRSFIEDLLFNKVTLADAGFIKQYGDCLGDIAARDLICAQKFNGLTVLPPLLTDEMIAQYTSALLAGTITSGWTFGAGAALQIPFAMQMAYRFNGIGVTQNVLYENQKLIANQFNSAIGKIQDSLSSTASALGKLQDVVNQNAQALNTLVKQLSSNFGAISSVLNDILSRLDPPEAEVQIDRLITGRLQSLQTYVTQQLIRAAEIRASANLAATKMSECVLGQSKRVDFCGKGYHLMSFPQSAPHGVVFLHVTYVPAQEKNFTTAPAICHDGKAHFPREGVFVSNGTHWFVTQRNFYEPQIITTDNTFVSGNCDVVIGIVNNTVYDPLQSELDSIKEELDKIHKNGSGGSGDIIKLLNEQVNKEMQSSNLYMSMSSWCYTHSLDGAGLFLFDHAAEEYEHAKKLIIFLNENNVPVQLTSISAPEHKFEGLTQIFQKAYEHEQHISESINNIVDHAIKSKDHATFNFLQWYVAEQHEEEVLFKDILDKIELIGNENHGLYLADQYVKGIAKSRKSGS

SEQ ID NO: 282 - protein, 1519 aa, synthetic construct
NITNLCPFGQVFNASNFPSVYAWERLRISDCVADYAVLYNSSSSFSTFKCYGVSPTKLNDLCFSSVYADYFVVKGDDVRQIAPAQTGVIADYNYKLPDDFTGCVLAWNTNSVDSKSGNNFYYRLFRHGKIKPYERDISNVLYNSAGGTCSSISQLGCYEPLYSYGFWPTVGVGYQPYRVVVLSFELLNAPATVCGPGSGGSGSSQCVNLTTRTQLPPAYTNSFTRGVYYPDKVFRSSVLHSTQDLFLPFFSNVTWFHAIHVSGTNGTKRFDNPVLPFNDGVYFASTEKSNIIRGWIFGTTLDSKTQSLLIVNNATNVVIKVCEFQFCNDPFLGVYYHKNNKSWMESEFRVYSSANNCTFEYVSQPFLMDLEGKQGNFKNLREFVFKNIDGYFKIYSKHTPINLVRDLPQGFSALEPLVDLPIGINITRFQTLLALHRSYLTPGDSSSGWTAGAAAYYVGYLQPRTFLLKYNENGTITDAVDCALDPLSETKCTLKSFTVEKGIYQTSNFRVQPTESIVRFPNITNLCPFGEVFNATKFPSVYAWERKKISNCVADYSVLYNSTFFSTFKCYGVSATKLNDLCFSNVYADSFVVKGDDVRQIAPGQTGVIADYNYKLPDDFMGCVLAWNTRNIDATSTGNYNYKYRYLRHGKLRPFERDISNVPFSPDGKPCTPPALNCYWPLNDYGFYTTTGIGYQPYRVVVLSFELLNAPATVCGPKKSTNLVKNKCVNFNFNGLTGTGVLTESNKKFLPFQQFGRDIADTTDAVRDPQTLEILDITPCSFGGVSVITPGTNTSNQVAVLYQDVNCTEVPVAIHADQLTPTWRVYSTGSNVFQTRAGCLIGAEHVNNSYECDIPIGAGICASYQTQTNSPGSASSVASQSIIAYTMSLGAENSVAYSNNSIAIPTNFTISVTTEILPVSMTKTSVDCTMYICGDSTECSNLLLQYGSFCTQLNRALTGIAVEQDKNTQEVFAQVKQIYKTPPIKDFGGFNFSQILPDPSKPSKRSFIEDLLFNKVTLADAGFIKQYGDCLGDIAARDLICAQKFNGLTVLPPLLTDEMIAQYTSALLAGTITSGWTFGAGAALQIPFAMQMAYRFNGIGVTQNVLYENQKLIANQFNSAIGKIQDSLSSTASALGKLQDVVNQNAQALNTLVKQLSSNFGAISSVLNDILSRLDPPEAEVQIDRLITGRLQSLQTYVTQQLIRAAEIRASANLAATKMSECVLGQSKRVDFCGKGYHLMSFPQSAPHGVVFLHVTYVPAQEKNFTTAPAICHDGKAHFPREGVFVSNGTHWFVTQRNFYEPQIITTDNTFVSGNCDVVIGIVNNTVYDPLQSELDSIKEELDKIHKNGSGGSGDIIKLLNEQVNKEMQSSNLYMSMSSWCYTHSLDGAGLFLFDHAAEEYEHAKKLIIFLNENNVPVQLTSISAPEHKFEGLTQIFQKAYEHEQHISESINNIVDHAIKSKDHATFNFLQWYVAEQHEEEVLFKDILDKIELIGNENHGLYLADQYVKGIAKSRKSGS

SEQ ID NO: 283 - protein, 1516 aa, synthetic construct
NITNLCPFSQVFNATRFPSVYAWTRERISNCIADYSVLYNSTSFSTFRCYGVSPTKLNDLCFSNVYADSMVVRGDEVRQIAPSQTGVIADYNYKLPDDFTGCVIAWNSKAKDENGQYFYRLFRKSKLLPFQRDVSNVTYGSGKNDGCNPSEADCYWPLLKYGFTGSVSQDYQPYRVVVLSFELLNAPATVCGPGSGGSGSSQCVNLTTRTQLPPAYTNSFTRGVYYPDKVFRSSVLHSTQDLFLPFFSNVTWFHAIHVSGTNGTKRFDNPVLPFNDGVYFASTEKSNIIRGWIFGTTLDSKTQSLLIVNNATNVVIKVCEFQFCNDPFLGVYYHKNNKSWMESEFRVYSSANNCTFEYVSQPFLMDLEGKQGNFKNLREFVFKNIDGYFKIYSKHTPINLVRDLPQGFSALEPLVDLPIGINITRFQTLLALHRSYLTPGDSSSGWTAGAAAYYVGYLQPRTFLLKYNENGTITDAVDCALDPLSETKCTLKSFTVEKGIYQTSNFRVQPTESIVRFPNITNLCPFGEVFNATKFPSVYAWERKKISNCVADYSVLYNSTFFSTFKCYGVSATKLNDLCFSNVYADSFVVKGDDVRQIAPGQTGVIADYNYKLPDDFMGCVLAWNTRNIDATSTGNYNYKYRYLRHGKLRPFERDISNVPFSPDGKPCTPPALNCYWPLNDYGFYTTTGIGYQPYRVVVLSFELLNAPATVCGPKKSTNLVKNKCVNFNFNGLTGTGVLTESNKKFLPFQQFGRDIADTTDAVRDPQTLEILDITPCSFGGVSVITPGTNTSNQVAVLYQDVNCTEVPVAIHADQLTPTWRVYSTGSNVFQTRAGCLIGAEHVNNSYECDIPIGAGICASYQTQTNSPGSASSVASQSIIAYTMSLGAENSVAYSNNSIAIPTNFTISVTTEILPVSMTKTSVDCTMYICGDSTECSNLLLQYGSFCTQLNRALTGIAVEQDKNTQEVFAQVKQIYKTPPIKDFGGFNFSQILPDPSKPSKRSFIEDLLFNKVTLADAGFIKQYGDCLGDIAARDLICAQKFNGLTVLPPLLTDEMIAQYTSALLAGTITSGWTFGAGAALQIPFAMQMAYRFNGIGVTQNVLYENQKLIANQFNSAIGKIQDSLSSTASALGKLQDVVNQNAQALNTLVKQLSSNFGAISSVLNDILSRLDPPEAEVQIDRLITGRLQSLQTYVTQQLIRAAEIRASANLAATKMSECVLGQSKRVDFCGKGYHLMSFPQSAPHGVVFLHVTYVPAQEKNFTTAPAICHDGKAHFPREGVFVSNGTHWFVTQRNFYEPQIITTDNTFVSGNCDVVIGIVNNTVYDPLQSELDSIKEELDKIHKNGSGGSGDIIKLLNEQVNKEMQSSNLYMSMSSWCYTHSLDGAGLFLFDHAAEEYEHAKKLIIFLNENNVPVQLTSISAPEHKFEGLTQIFQKAYEHEQHISESINNIVDHAIKSKDHATFNFLQWYVAEQHEEEVLFKDILDKIELIGNENHGLYLADQYVKGIAKSRKSGS

SEQ ID NO: 284 - protein, 1502 aa, synthetic construct
NITNRCPFDKVFNATRFPNVYAWERTKISDCVADYTVLYNSTSFSTFKCYGVSPSKLIDLCFTSVYADTFLIRSSEVRQVAPGETGVIADYNYKLPDDFTGCVIAWNTAKHDTGNYYYRSHRKTKLKPFERDLSSDDGNGVYTLSTYDFNPNVPVAYQATRVVVLSFELLNAPATVCGPGSGGSGSSQCVNLTTRTQLPPAYTNSFTRGVYYPDKVFRSSVLHSTQDLFLPFFSNVTWFHAIHVSGTNGTKRFDNPVLPFNDGVYFASTEKSNIIRGWIFGTTLDSKTQSLLIVNNATNVVIKVCEFQFCNDPFLGVYYHKNNKSWMESEFRVYSSANNCTFEYVSQPFLMDLEGKQGNFKNLREFVFKNIDGYFKIYSKHTPINLVRDLPQGFSALEPLVDLPIGINITRFQTLLALHRSYLTPGDSSSGWTAGAAAYYVGYLQPRTFLLKYNENGTITDAVDCALDPLSETKCTLKSFTVEKGIYQTSNFRVQPTESIVRFPNITNLCPFGEVFNATKFPSVYAWERKKISNCVADYSVLYNSTFFSTFKCYGVSATKLNDLCFSNVYADSFVVKGDDVRQIAPGQTGVIADYNYKLPDDFMGCVLAWNTRNIDATSTGNYNYKYRYLRHGKLRPFERDISNVPFSPDGKPCTPPALNCYWPLNDYGFYTTTGIGYQPYRVVVLSFELLNAPATVCGPKKSTNLVKNKCVNFNFNGLTGTGVLTESNKKFLPFQQFGRDIADTTDAVRDPQTLEILDITPCSFGGVSVITPGTNTSNQVAVLYQDVNCTEVPVAIHADQLTPTWRVYSTGSNVFQTRAGCLIGAEHVNNSYECDIPIGAGICASYQTQTNSPGSASSVASQSIIAYTMSLGAENSVAYSNNSIAIPTNFTISVTTEILPVSMTKTSVDCTMYICGDSTECSNLLLQYGSFCTQLNRALTGIAVEQDKNTQEVFAQVKQIYKTPPIKDFGGFNFSQILPDPSKPSKRSFIEDLLFNKVTLADAGFIKQYGDCLGDIAARDLICAQKFNGLTVLPPLLTDEMIAQYTSALLAGTITSGWTFGAGAALQIPFAMQMAYRFNGIGVTQNVLYENQKLIANQFNSAIGKIQDSLSSTASALGKLQDVVNQNAQALNTLVKQLSSNFGAISSVLNDILSRLDPPEAEVQIDRLITGRLQSLQTYVTQQLIRAAEIRASANLAATKMSECVLGQSKRVDFCGKGYHLMSFPQSAPHGVVFLHVTYVPAQEKNFTTAPAICHDGKAHFPREGVFVSNGTHWFVTQRNFYEPQIITTDNTFVSGNCDVVIGIVNNTVYDPLQSELDSIKEELDKIHKNGSGGSGDIIKLLNEQVNKEMQSSNLYMSMSSWCYTHSLDGAGLFLFDHAAEEYEHAKKLIIFLNENNVPVQLTSISAPEHKFEGLTQIFQKAYEHEQHISESINNIVDHAIKSKDHATFNFLQWYVAEQHEEEVLFKDILDKIELIGNENHGLYLADQYVKGIAKSRKSGS

SEQ ID NO: 285 - protein, 1517 aa, synthetic construct
NVTQLCPFSDVFNRTMFPSVYAWERMSIRDCVADYAVLYNSSISFSTFECYGVSPTKLNDLCFSSVYADYFVVRGDDVKQIAPGKTGVIADYNYKLPDDFVGCVLAWNSRHVDNKQGFYYRLFRHGKIKPYQRDMSRELYSPSGTPCTVVGFNCYDPLAHYAFASPGIGIGYQPFRVVVLSFQLLNAPATVCGPGSGGSGSSQCVNLTTRTQLPPAYTNSFTRGVYYPDKVFRSSVLHSTQDLFLPFFSNVTWFHAIHVSGTNGTKRFDNPVLPFNDGVYFASTEKSNIIRGWIFGTTLDSKTQSLLIVNNATNVVIKVCEFQFCNDPFLGVYYHKNNKSWMESEFRVYSSANNCTFEYVSQPFLMDLEGKQGNFKNLREFVFKNIDGYFKIYSKHTPINLVRDLPQGFSALEPLVDLPIGINITRFQTLLALHRSYLTPGDSSSGWTAGAAAYYVGYLQPRTFLLKYNENGTITDAVDCALDPLSETKCTLKSFTVEKGIYQTSNFRVQPTESIVRFPNITNLCPFGEVFNATKFPSVYAWERKKISNCVADYSVLYNSTFFSTFKCYGVSATKLNDLCFSNVYADSFVVKGDDVRQIAPGQTGVIADYNYKLPDDFMGCVLAWNTRNIDATSTGNYNYKYRYLRHGKLRPFERDISNVPFSPDGKPCTPPALNCYWPLNDYGFYTTTGIGYQPYRVVVLSFELLNAPATVCGPKKSTNLVKNKCVNFNFNGLTGTGVLTESNKKFLPFQQFGRDIADTTDAVRDPQTLEILDITPCSFGGVSVITPGTNTSNQVAVLYQDVNCTEVPVAIHADQLTPTWRVYSTGSNVFQTRAGCLIGAEHVNNSYECDIPIGAGICASYQTQTNSPGSASSVASQSIIAYTMSLGAENSVAYSNNSIAIPTNFTISVTTEILPVSMTKTSVDCTMYICGDSTECSNLLLQYGSFCTQLNRALTGIAVEQDKNTQEVFAQVKQIYKTPPIKDFGGFNFSQILPDPSKPSKRSFIEDLLFNKVTLADAGFIKQYGDCLGDIAARDLICAQKFNGLTVLPPLLTDEMIAQYTSALLAGTITSGWTFGAGAALQIPFAMQMAYRFNGIGVTQNVLYENQKLIANQFNSAIGKIQDSLSSTASALGKLQDVVNQNAQALNTLVKQLSSNFGAISSVLNDILSRLDPPEAEVQIDRLITGRLQSLQTYVTQQLIRAAEIRASANLAATKMSECVLGQSKRVDFCGKGYHLMSFPQSAPHGVVFLHVTYVPAQEKNFTTAPAICHDGKAHFPREGVFVSNGTHWFVTQRNFYEPQIITTDNTFVSGNCDVVIGIVNNTVYDPLQSELDSIKEELDKIHKNGSGGSGDIIKLLNEQVNKEMQSSNLYMSMSSWCYTHSLDGAGLFLFDHAAEEYEHAKKLIIFLNENNVPVQLTSISAPEHKFEGLTQIFQKAYEHEQHISESINNIVDHAIKSKDHATFNFLQWYVAEQHEEEVLFKDILDKIELIGNENHGLYLADQYVKGIAKSRKSGS

SEQ ID NO: 286 - protein, 1519 aa, synthetic construct
NITNLCPFDEVFNATRFPSVYAWERKKISNCVADYSVLYNSTSFSTFKCYGVSPSKLNDLCFTSVYADSFVIRGDEVRQIAPGQTGVIADYNYKLPDDFTGCVIAWNTANQDSGEGGNPNYYYRSSRKSKLKPFERDLSSDEYNVGSQPCNRMGPNCYRTLSTYDFYPTVGVGYQPYRVVVLSFELLNAPATVCGPGSGGSGSSQCVNLTTRTQLPPAYTNSFTRGVYYPDKVFRSSVLHSTQDLFLPFFSNVTWFHAIHVSGTNGTKRFDNPVLPFNDGVYFASTEKSNIIRGWIFGTTLDSKTQSLLIVNNATNVVIKVCEFQFCNDPFLGVYYHKNNKSWMESEFRVYSSANNCTFEYVSQPFLMDLEGKQGNFKNLREFVFKNIDGYFKIYSKHTPINLVRDLPQGFSALEPLVDLPIGINITRFQTLLALHRSYLTPGDSSSGWTAGAAAYYVGYLQPRTFLLKYNENGTITDAVDCALDPLSETKCTLKSFTVEKGIYQTSNFRVQPTESIVRFPNITNLCPFGEVFNATKFPSVYAWERKKISNCVADYSVLYNSTFFSTFKCYGVSATKLNDLCFSNVYADSFVVKGDDVRQIAPGQTGVIADYNYKLPDDFMGCVLAWNTRNIDATSTGNYNYKYRYLRHGKLRPFERDISNVPFSPDGKPCTPPALNCYWPLNDYGFYTTTGIGYQPYRVVVLSFELLNAPATVCGPKKSTNLVKNKCVNFNFNGLTGTGVLTESNKKFLPFQQFGRDIADTTDAVRDPQTLEILDITPCSFGGVSVITPGTNTSNQVAVLYQDVNCTEVPVAIHADQLTPTWRVYSTGSNVFQTRAGCLIGAEHVNNSYECDIPIGAGICASYQTQTNSPGSASSVASQSIIAYTMSLGAENSVAYSNNSIAIPTNFTISVTTEILPVSMTKTSVDCTMYICGDSTECSNLLLQYGSFCTQLNRALTGIAVEQDKNTQEVFAQVKQIYKTPPIKDFGGFNFSQILPDPSKPSKRSFIEDLLFNKVTLADAGFIKQYGDCLGDIAARDLICAQKFNGLTVLPPLLTDEMIAQYTSALLAGTITSGWTFGAGAALQIPFAMQMAYRFNGIGVTQNVLYENQKLIANQFNSAIGKIQDSLSSTASALGKLQDVVNQNAQALNTLVKQLSSNFGAISSVLNDILSRLDPPEAEVQIDRLITGRLQSLQTYVTQQLIRAAEIRASANLAATKMSECVLGQSKRVDFCGKGYHLMSFPQSAPHGVVFLHVTYVPAQEKNFTTAPAICHDGKAHFPREGVFVSNGTHWFVTQRNFYEPQIITTDNTFVSGNCDVVIGIVNNTVYDPLQSELDSIKEELDKIHKNGSGGSGDIIKLLNEQVNKEMQSSNLYMSMSSWCYTHSLDGAGLFLFDHAAEEYEHAKKLIIFLNENNVPVQLTSISAPEHKFEGLTQIFQKAYEHEQHISESINNIVDHAIKSKDHATFNFLQWYVAEQHEEEVLFKDILDKIELIGNENHGLYLADQYVKGIAKSRKSGS

SEQ ID NO: 287 - protein, 1606 aa, synthetic construct
NLPDCNIEEWLTAKSVPSPLNWERKTFSNCNFNLSSLLRFVQADSFSCNNIDASKVYGMCFGSISVDKFAIPNSRQVDLQLGNSGFLQSFNYKIDTTATSCQLYYSLPANNVTINNYNPSSWNRRYGFNDDTVFKPRPAGVLTNHDVVYSQQCFKVPNTFCPCKNNGSCVSSGKGTTNGSGTCPAGTNYRTCENTTWCACSCTPDPITASGPRKCPQKKSLVGVGEHCSGLGVDSDYCGNVSCLCSTDAFLGWSADSCLVNDRCNIFANIILNGINSGTTCSTGSGGSGSSQCVNLTTRTQLPPAYTNSFTRGVYYPDKVFRSSVLHSTQDLFLPFFSNVTWFHAIHVSGTNGTKRFDNPVLPFNDGVYFASTEKSNIIRGWIFGTTLDSKTQSLLIVNNATNVVIKVCEFQFCNDPFLGVYYHKNNKSWMESEFRVYSSANNCTFEYVSQPFLMDLEGKQGNFKNLREFVFKNIDGYFKIYSKHTPINLVRDLPQGFSALEPLVDLPIGINITRFQTLLALHRSYLTPGDSSSGWTAGAAAYYVGYLQPRTFLLKYNENGTITDAVDCALDPLSETKCTLKSFTVEKGIYQTSNFRVQPTESIVRFPNITNLCPFGEVFNATKFPSVYAWERKKISNCVADYSVLYNSTFFSTFKCYGVSATKLNDLCFSNVYADSFVVKGDDVRQIAPGQTGVIADYNYKLPDDFMGCVLAWNTRNIDATSTGNYNYKYRYLRHGKLRPFERDISNVPFSPDGKPCTPPALNCYWPLNDYGFYTTTGIGYQPYRVVVLSFELLNAPATVCGPKKSTNLVKNKCVNFNFNGLTGTGVLTESNKKFLPFQQFGRDIADTTDAVRDPQTLEILDITPCSFGGVSVITPGTNTSNQVAVLYQDVNCTEVPVAIHADQLTPTWRVYSTGSNVFQTRAGCLIGAEHVNNSYECDIPIGAGICASYQTQTNSPGSASSVASQSIIAYTMSLGAENSVAYSNNSIAIPTNFTISVTTEILPVSMTKTSVDCTMYICGDSTECSNLLLQYGSFCTQLNRALTGIAVEQDKNTQEVFAQVKQIYKTPPIKDFGGFNFSQILPDPSKPSKRSFIEDLLFNKVTLADAGFIKQYGDCLGDIAARDLICAQKFNGLTVLPPLLTDEMIAQYTSALLAGTITSGWTFGAGAALQIPFAMQMAYRFNGIGVTQNVLYENQKLIANQFNSAIGKIQDSLSSTASALGKLQDVVNQNAQALNTLVKQLSSNFGAISSVLNDILSRLDPPEAEVQIDRLITGRLQSLQTYVTQQLIRAAEIRASANLAATKMSECVLGQSKRVDFCGKGYHLMSFPQSAPHGVVFLHVTYVPAQEKNFTTAPAICHDGKAHFPREGVFVSNGTHWFVTQRNFYEPQIITTDNTFVSGNCDVVIGIVNNTVYDPLQSELDSIKEELDKIHKNGSGGSGDIIKLLNEQVNKEMQSSNLYMSMSSWCYTHSLDGAGLFLFDHAAEEYEHAKKLIIFLNENNVPVQLTSISAPEHKFEGLTQIFQKAYEHEQHISESINNIVDHAIKSKDHATFNFLQWYVAEQHEEEVLFKDILDKIELIGNENHGLYLADQYVKGIAKSRKSGS

SEQ ID NO: 288 - protein, 1532 aa, synthetic construct
QGVECDFSKLFKAAAPQIYNFSRLVFTNCNYNLTKLLSLFQVDEFSCHQISPSALASGCYSSLTVDYFAYPLSMKSYLQIGSAGEISQFNYKQDFSNPTCRILASVPANVSITKPDKYIYISQCYSLSAYSDVDVPHYVNPGQYTSIPCLYLTSSGFDEDGQYFRYNLTQFEGQNYLVATGVTVSMTDNLQMVFVITVQYGTDTNSVCPGSGGSGSSQCVNLTTRTQLPPAYTNSFTRGVYYPDKVFRSSVLHSTQDLFLPFFSNVTWFHAIHVSGTNGTKRFDNPVLPFNDGVYFASTEKSNIIRGWIFGTTLDSKTQSLLIVNNATNVVIKVCEFQFCNDPFLGVYYHKNNKSWMESEFRVYSSANNCTFEYVSQPFLMDLEGKQGNFKNLREFVFKNIDGYFKIYSKHTPINLVRDLPQGFSALEPLVDLPIGINITRFQTLLALHRSYLTPGDSSSGWTAGAAAYYVGYLQPRTFLLKYNENGTITDAVDCALDPLSETKCTLKSFTVEKGIYQTSNFRVQPTESIVRFPNITNLCPFGEVFNATKFPSVYAWERKKISNCVADYSVLYNSTFFSTFKCYGVSATKLNDLCFSNVYADSFVVKGDDVRQIAPGQTGVIADYNYKLPDDFMGCVLAWNTRNIDATSTGNYNYKYRYLRHGKLRPFERDISNVPFSPDGKPCTPPALNCYWPLNDYGFYTTTGIGYQPYRVVVLSFELLNAPATVCGPKKSTNLVKNKCVNFNFNGLTGTGVLTESNKKFLPFQQFGRDIADTTDAVRDPQTLEILDITPCSFGGVSVITPGTNTSNQVAVLYQDVNCTEVPVAIHADQLTPTWRVYSTGSNVFQTRAGCLIGAEHVNNSYECDIPIGAGICASYQTQTNSPGSASSVASQSIIAYTMSLGAENSVAYSNNSIAIPTNFTISVTTEILPVSMTKTSVDCTMYICGDSTECSNLLLQYGSFCTQLNRALTGIAVEQDKNTQEVFAQVKQIYKTPPIKDFGGFNFSQILPDPSKPSKRSFIEDLLFNKVTLADAGFIKQYGDCLGDIAARDLICAQKFNGLTVLPPLLTDEMIAQYTSALLAGTITSGWTFGAGAALQIPFAMQMAYRFNGIGVTQNVLYENQKLIANQFNSAIGKIQDSLSSTASALGKLQDVVNQNAQALNTLVKQLSSNFGAISSVLNDILSRLDPPEAEVQIDRLITGRLQSLQTYVTQQLIRAAEIRASANLAATKMSECVLGQSKRVDFCGKGYHLMSFPQSAPHGVVFLHVTYVPAQEKNFTTAPAICHDGKAHFPREGVFVSNGTHWFVTQRNFYEPQIITTDNTFVSGNCDVVIGIVNNTVYDPLQSELDSIKEELDKIHKNGSGGSGDIIKLLNEQVNKEMQSSNLYMSMSSWCYTHSLDGAGLFLFDHAAEEYEHAKKLIIFLNENNVPVQLTSISAPEHKFEGLTQIFQKAYEHEQHISESINNIVDHAIKSKDHATFNFLQWYVAEQHEEEVLFKDILDKIELIGNENHGLYLADQYVKGIAKSRKSGS

SEQ ID NO: 289 - protein, 1531 aa, synthetic construct
ELTECDLDVLFKNDAPIIANYSRRVFTNCNYNLTKLLSLVQVDEFVCHKTTPEALATGCYSSLTVDWFALPFSMKSTLAIGSAEAISMFNYNQDYSNPTCRIHAAVTANVSTALNFTANANYAYISRCQGVDGKPILLQPGQMTNIACRSGVLARPSDADYFGYSFQGRNYYLGRKSYKPKTDEGDVQMVYVITPKYDKGPDTVCPLKGSGGSGSSQCVNLTTRTQLPPAYTNSFTRGVYYPDKVFRSSVLHSTQDLFLPFFSNVTWFHAIHVSGTNGTKRFDNPVLPFNDGVYFASTEKSNIIRGWIFGTTLDSKTQSLLIVNNATNVVIKVCEFQFCNDPFLGVYYHKNNKSWMESEFRVYSSANNCTFEYVSQPFLMDLEGKQGNFKNLREFVFKNIDGYFKIYSKHTPINLVRDLPQGFSALEPLVDLPIGINITRFQTLLALHRSYLTPGDSSSGWTAGAAAYYVGYLQPRTFLLKYNENGTITDAVDCALDPLSETKCTLKSFTVEKGIYQTSNFRVQPTESIVRFPNITNLCPFGEVFNATKFPSVYAWERKKISNCVADYSVLYNSTFFSTFKCYGVSATKLNDLCFSNVYADSFVVKGDDVRQIAPGQTGVIADYNYKLPDDFMGCVLAWNTRNIDATSTGNYNYKYRYLRHGKLRPFERDISNVPFSPDGKPCTPPALNCYWPLNDYGFYTTTGIGYQPYRVVVLSFELLNAPATVCGPKKSTNLVKNKCVNFNFNGLTGTGVLTESNKKFLPFQQFGRDIADTTDAVRDPQTLEILDITPCSFGGVSVITPGTNTSNQVAVLYQDVNCTEVPVAIHADQLTPTWRVYSTGSNVFQTRAGCLIGAEHVNNSYECDIPIGAGICASYQTQTNSPGSASSVASQSIIAYTMSLGAENSVAYSNNSIAIPTNFTISVTTEILPVSMTKTSVDCTMYICGDSTECSNLLLQYGSFCTQLNRALTGIAVEQDKNTQEVFAQVKQIYKTPPIKDFGGFNFSQILPDPSKPSKRSFIEDLLFNKVTLADAGFIKQYGDCLGDIAARDLICAQKFNGLTVLPPLLTDEMIAQYTSALLAGTITSGWTFGAGAALQIPFAMQMAYRFNGIGVTQNVLYENQKLIANQFNSAIGKIQDSLSSTASALGKLQDVVNQNAQALNTLVKQLSSNFGAISSVLNDILSRLDPPEAEVQIDRLITGRLQSLQTYVTQQLIRAAEIRASANLAATKMSECVLGQSKRVDFCGKGYHLMSFPQSAPHGVVFLHVTYVPAQEKNFTTAPAICHDGKAHFPREGVFVSNGTHWFVTQRNFYEPQIITTDNTFVSGNCDVVIGIVNNTVYDPLQSELDSIKEELDKIHKNGSGGSGDIIKLLNEQVNKEMQSSNLYMSMSSWCYTHSLDGAGLFLFDHAAEEYEHAKKLIIFLNENNVPVQLTSISAPEHKFEGLTQIFQKAYEHEQHISESINNIVDHAIKSKDHATFNFLQWYVAEQHEEEVLFKDILDKIELIGNENHGLYLADQYVKGIAKSRKSGS

SEQ ID NO: 290 - protein, 1527 aa, synthetic construct
VYPDCNFTELFRERAPTIMQYKREVFTRCNYNLSLLLSLVQVDEFVCDKITPEALATGCYSSLTVDWFAFPYAWKSYLAIGSADRIVRFNYNQDYSNPSCRIHSKVNSSIGISYAGAYSYITNCNYGATNKDDVVKPGGRASQQCITGALNSPTTGQLWAYNFGGVPYRVSRLTYTDHLSDPLDMVYVITVKYEPGAETVCPKQGSGGSGSSQCVNLTTRTQLPPAYTNSFTRGVYYPDKVFRSSVLHSTQDLFLPFFSNVTWFHAIHVSGTNGTKRFDNPVLPFNDGVYFASTEKSNIIRGWIFGTTLDSKTQSLLIVNNATNVVIKVCEFQFCNDPFLGVYYHKNNKSWMESEFRVYSSANNCTFEYVSQPFLMDLEGKQGNFKNLREFVFKNIDGYFKIYSKHTPINLVRDLPQGFSALEPLVDLPIGINITRFQTLLALHRSYLTPGDSSSGWTAGAAAYYVGYLQPRTFLLKYNENGTITDAVDCALDPLSETKCTLKSFTVEKGIYQTSNFRVQPTESIVRFPNITNLCPFGEVFNATKFPSVYAWERKKISNCVADYSVLYNSTFFSTFKCYGVSATKLNDLCFSNVYADSFVVKGDDVRQIAPGQTGVIADYNYKLPDDFMGCVLAWNTRNIDATSTGNYNYKYRYLRHGKLRPFERDISNVPFSPDGKPCTPPALNCYWPLNDYGFYTTTGIGYQPYRVVVLSFELLNAPATVCGPKKSTNLVKNKCVNFNFNGLTGTGVLTESNKKFLPFQQFGRDIADTTDAVRDPQTLEILDITPCSFGGVSVITPGTNTSNQVAVLYQDVNCTEVPVAIHADQLTPTWRVYSTGSNVFQTRAGCLIGAEHVNNSYECDIPIGAGICASYQTQTNSPGSASSVASQSIIAYTMSLGAENSVAYSNNSIAIPTNFTISVTTEILPVSMTKTSVDCTMYICGDSTECSNLLLQYGSFCTQLNRALTGIAVEQDKNTQEVFAQVKQIYKTPPIKDFGGFNFSQILPDPSKPSKRSFIEDLLFNKVTLADAGFIKQYGDCLGDIAARDLICAQKFNGLTVLPPLLTDEMIAQYTSALLAGTITSGWTFGAGAALQIPFAMQMAYRFNGIGVTQNVLYENQKLIANQFNSAIGKIQDSLSSTASALGKLQDVVNQNAQALNTLVKQLSSNFGAISSVLNDILSRLDPPEAEVQIDRLITGRLQSLQTYVTQQLIRAAEIRASANLAATKMSECVLGQSKRVDFCGKGYHLMSFPQSAPHGVVFLHVTYVPAQEKNFTTAPAICHDGKAHFPREGVFVSNGTHWFVTQRNFYEPQIITTDNTFVSGNCDVVIGIVNNTVYDPLQSELDSIKEELDKIHKNGSGGSGDIIKLLNEQVNKEMQSSNLYMSMSSWCYTHSLDGAGLFLFDHAAEEYEHAKKLIIFLNENNVPVQLTSISAPEHKFEGLTQIFQKAYEHEQHISESINNIVDHAIKSKDHATFNFLQWYVAEQHEEEVLFKDILDKIELIGNENHGLYLADQYVKGIAKSRKSGS

SEQ ID NO: 291 - protein, 1533 aa, synthetic construct
QATECDFSPMLTGVAPQVYNFKRLVFSNCNYNLTKLLSLFAVDEFSCNGISPDAIARGCYSTLTVDYFAYPLSMKSYIRPGSAGNIPLYNYKQSFANPTCRVMASVPANVTITKPDAYGYISKCSRLTGANQDVETPLYINPGEYSICRDFSPGGFSEDGQVFKRTLTQFEGGGLLIGVGTRVPMTDNLQMSFIIFVQYGTGTDSVCPMLGSGGSGSSQCVNLTTRTQLPPAYTNSFTRGVYYPDKVFRSSVLHSTQDLFLPFFSNVTWFHAIHVSGTNGTKRFDNPVLPFNDGVYFASTEKSNIIRGWIFGTTLDSKTQSLLIVNNATNVVIKVCEFQFCNDPFLGVYYHKNNKSWMESEFRVYSSANNCTFEYVSQPFLMDLEGKQGNFKNLREFVFKNIDGYFKIYSKHTPINLVRDLPQGFSALEPLVDLPIGINITRFQTLLALHRSYLTPGDSSSGWTAGAAAYYVGYLQPRTFLLKYNENGTITDAVDCALDPLSETKCTLKSFTVEKGIYQTSNFRVQPTESIVRFPNITNLCPFGEVFNATKFPSVYAWERKKISNCVADYSVLYNSTFFSTFKCYGVSATKLNDLCFSNVYADSFVVKGDDVRQIAPGQTGVIADYNYKLPDDFMGCVLAWNTRNIDATSTGNYNYKYRYLRHGKLRPFERDISNVPFSPDGKPCTPPALNCYWPLNDYGFYTTTGIGYQPYRVVVLSFELLNAPATVCGPKKSTNLVKNKCVNFNFNGLTGTGVLTESNKKFLPFQQFGRDIADTTDAVRDPQTLEILDITPCSFGGVSVITPGTNTSNQVAVLYQDVNCTEVPVAIHADQLTPTWRVYSTGSNVFQTRAGCLIGAEHVNNSYECDIPIGAGICASYQTQTNSPGSASSVASQSIIAYTMSLGAENSVAYSNNSIAIPTNFTISVTTEILPVSMTKTSVDCTMYICGDSTECSNLLLQYGSFCTQLNRALTGIAVEQDKNTQEVFAQVKQIYKTPPIKDFGGFNFSQILPDPSKPSKRSFIEDLLFNKVTLADAGFIKQYGDCLGDIAARDLICAQKFNGLTVLPPLLTDEMIAQYTSALLAGTITSGWTFGAGAALQIPFAMQMAYRFNGIGVTQNVLYENQKLIANQFNSAIGKIQDSLSSTASALGKLQDVVNQNAQALNTLVKQLSSNFGAISSVLNDILSRLDPPEAEVQIDRLITGRLQSLQTYVTQQLIRAAEIRASANLAATKMSECVLGQSKRVDFCGKGYHLMSFPQSAPHGVVFLHVTYVPAQEKNFTTAPAICHDGKAHFPREGVFVSNGTHWFVTQRNFYEPQIITTDNTFVSGNCDVVIGIVNNTVYDPLQSELDSIKEELDKIHKNGSGGSGDIIKLLNEQVNKEMQSSNLYMSMSSWCYTHSLDGAGLFLFDHAAEEYEHAKKLIIFLNENNVPVQLTSISAPEHKFEGLTQIFQKAYEHEQHISESINNIVDHAIKSKDHATFNFLQWYVAEQHEEEVLFKDILDKIELIGNENHGLYLADQYVKGIAKSRKSGS

SEQ ID NO: 292 - protein, 1524 aa, synthetic construct
QGVECDFSKLFKAAPPQIYNFSRLVFTNCNYNLTKLLSLFHVSEFSCHQVSPSALASGCYSSLTVDYFAYPLYLASYLQQGSTGEIAQYNYKQDFSNPTCRILASVPANVSIPKPDKYIWLSQCYSFSAYSGDIPHYVQPGQYTPCLYLTSSGFDKSYQTNRDMQNKMAATGVTSSMTDNLQMAFVISVQYGTDTNSVCPMGSGGSGSSQCVNLTTRTQLPPAYTNSFTRGVYYPDKVFRSSVLHSTQDLFLPFFSNVTWFHAIHVSGTNGTKRFDNPVLPFNDGVYFASTEKSNIIRGWIFGTTLDSKTQSLLIVNNATNVVIKVCEFQFCNDPFLGVYYHKNNKSWMESEFRVYSSANNCTFEYVSQPFLMDLEGKQGNFKNLREFVFKNIDGYFKIYSKHTPINLVRDLPQGFSALEPLVDLPIGINITRFQTLLALHRSYLTPGDSSSGWTAGAAAYYVGYLQPRTFLLKYNENGTITDAVDCALDPLSETKCTLKSFTVEKGIYQTSNFRVQPTESIVRFPNITNLCPFGEVFNATKFPSVYAWERKKISNCVADYSVLYNSTFFSTFKCYGVSATKLNDLCFSNVYADSFVVKGDDVRQIAPGQTGVIADYNYKLPDDFMGCVLAWNTRNIDATSTGNYNYKYRYLRHGKLRPFERDISNVPFSPDGKPCTPPALNCYWPLNDYGFYTTTGIGYQPYRVVVLSFELLNAPATVCGPKKSTNLVKNKCVNFNFNGLTGTGVLTESNKKFLPFQQFGRDIADTTDAVRDPQTLEILDITPCSFGGVSVITPGTNTSNQVAVLYQDVNCTEVPVAIHADQLTPTWRVYSTGSNVFQTRAGCLIGAEHVNNSYECDIPIGAGICASYQTQTNSPGSASSVASQSIIAYTMSLGAENSVAYSNNSIAIPTNFTISVTTEILPVSMTKTSVDCTMYICGDSTECSNLLLQYGSFCTQLNRALTGIAVEQDKNTQEVFAQVKQIYKTPPIKDFGGFNFSQILPDPSKPSKRSFIEDLLFNKVTLADAGFIKQYGDCLGDIAARDLICAQKFNGLTVLPPLLTDEMIAQYTSALLAGTITSGWTFGAGAALQIPFAMQMAYRFNGIGVTQNVLYENQKLIANQFNSAIGKIQDSLSSTASALGKLQDVVNQNAQALNTLVKQLSSNFGAISSVLNDILSRLDPPEAEVQIDRLITGRLQSLQTYVTQQLIRAAEIRASANLAATKMSECVLGQSKRVDFCGKGYHLMSFPQSAPHGVVFLHVTYVPAQEKNFTTAPAICHDGKAHFPREGVFVSNGTHWFVTQRNFYEPQIITTDNTFVSGNCDVVIGIVNNTVYDPLQSELDSIKEELDKIHKNGSGGSGDIIKLLNEQVNKEMQSSNLYMSMSSWCYTHSLDGAGLFLFDHAAEEYEHAKKLIIFLNENNVPVQLTSISAPEHKFEGLTQIFQKAYEHEQHISESINNIVDHAIKSKDHATFNFLQWYVAEQHEEEVLFKDILDKIELIGNENHGLYLADQYVKGIAKSRKSGS

SEQ ID NO: 293 - protein, 1524 aa, synthetic construct
QGVECDFSKLFKAAPPQIYNFSRLVFTNCNYNLTKLLSLFHVSEFSCHQVSPSALASGCYSSLTVDYFAYPLYLASYLQQGSTGEIAQYNYKQDFSNPTCRILASVPANVSIPKPDKYIWLSQCYSFSAYSGDVPHYVLPGQYTPCLYLTSSGFDNSYQTNRDFQNKMAATGVISSMTDNLQMAFVISVQYGTDTNSVCPMGSGGSGSSQCVNLTTRTQLPPAYTNSFTRGVYYPDKVFRSSVLHSTQDLFLPFFSNVTWFHAIHVSGTNGTKRFDNPVLPFNDGVYFASTEKSNIIRGWIFGTTLDSKTQSLLIVNNATNVVIKVCEFQFCNDPFLGVYYHKNNKSWMESEFRVYSSANNCTFEYVSQPFLMDLEGKQGNFKNLREFVFKNIDGYFKIYSKHTPINLVRDLPQGFSALEPLVDLPIGINITRFQTLLALHRSYLTPGDSSSGWTAGAAAYYVGYLQPRTFLLKYNENGTITDAVDCALDPLSETKCTLKSFTVEKGIYQTSNFRVQPTESIVRFPNITNLCPFGEVFNATKFPSVYAWERKKISNCVADYSVLYNSTFFSTFKCYGVSATKLNDLCFSNVYADSFVVKGDDVRQIAPGQTGVIADYNYKLPDDFMGCVLAWNTRNIDATSTGNYNYKYRYLRHGKLRPFERDISNVPFSPDGKPCTPPALNCYWPLNDYGFYTTTGIGYQPYRVVVLSFELLNAPATVCGPKKSTNLVKNKCVNFNFNGLTGTGVLTESNKKFLPFQQFGRDIADTTDAVRDPQTLEILDITPCSFGGVSVITPGTNTSNQVAVLYQDVNCTEVPVAIHADQLTPTWRVYSTGSNVFQTRAGCLIGAEHVNNSYECDIPIGAGICASYQTQTNSPGSASSVASQSIIAYTMSLGAENSVAYSNNSIAIPTNFTISVTTEILPVSMTKTSVDCTMYICGDSTECSNLLLQYGSFCTQLNRALTGIAVEQDKNTQEVFAQVKQIYKTPPIKDFGGFNFSQILPDPSKPSKRSFIEDLLFNKVTLADAGFIKQYGDCLGDIAARDLICAQKFNGLTVLPPLLTDEMIAQYTSALLAGTITSGWTFGAGAALQIPFAMQMAYRFNGIGVTQNVLYENQKLIANQFNSAIGKIQDSLSSTASALGKLQDVVNQNAQALNTLVKQLSSNFGAISSVLNDILSRLDPPEAEVQIDRLITGRLQSLQTYVTQQLIRAAEIRASANLAATKMSECVLGQSKRVDFCGKGYHLMSFPQSAPHGVVFLHVTYVPAQEKNFTTAPAICHDGKAHFPREGVFVSNGTHWFVTQRNFYEPQIITTDNTFVSGNCDVVIGIVNNTVYDPLQSELDSIKEELDKIHKNGSGGSGDIIKLLNEQVNKEMQSSNLYMSMSSWCYTHSLDGAGLFLFDHAAEEYEHAKKLIIFLNENNVPVQLTSISAPEHKFEGLTQIFQKAYEHEQHISESINNIVDHAIKSKDHATFNFLQWYVAEQHEEEVLFKDILDKIELIGNENHGLYLADQYVKGIAKSRKSGS

SEQ ID NO: 294 - protein, 1522 aa, synthetic construct
TTQECDFTPMLTGTPPPIYNFKRLVFTNCNYNLTKLLSLFQVSEFSCHQVSPSSLATGCYSSLTVDYFAYSTDMSSYLQPGSAGAIVQFNYKQDFSNPTCRVLATVPQNLTTITKPSNYAYLTECYKTSAYGKNYLYNAPGAYTPCLSLASRGFSTKYQSHSDGELTTTGYIYPVTGNLQMAFIISVQYGTDTNSVCPMGSGGSGSSQCVNLTTRTQLPPAYTNSFTRGVYYPDKVFRSSVLHSTQDLFLPFFSNVTWFHAIHVSGTNGTKRFDNPVLPFNDGVYFASTEKSNIIRGWIFGTTLDSKTQSLLIVNNATNVVIKVCEFQFCNDPFLGVYYHKNNKSWMESEFRVYSSANNCTFEYVSQPFLMDLEGKQGNFKNLREFVFKNIDGYFKIYSKHTPINLVRDLPQGFSALEPLVDLPIGINITRFQTLLALHRSYLTPGDSSSGWTAGAAAYYVGYLQPRTFLLKYNENGTITDAVDCALDPLSETKCTLKSFTVEKGIYQTSNFRVQPTESIVRFPNITNLCPFGEVFNATKFPSVYAWERKKISNCVADYSVLYNSTFFSTFKCYGVSATKLNDLCFSNVYADSFVVKGDDVRQIAPGQTGVIADYNYKLPDDFMGCVLAWNTRNIDATSTGNYNYKYRYLRHGKLRPFERDISNVPFSPDGKPCTPPALNCYWPLNDYGFYTTTGIGYQPYRVVVLSFELLNAPATVCGPKKSTNLVKNKCVNFNFNGLTGTGVLTESNKKFLPFQQFGRDIADTTDAVRDPQTLEILDITPCSFGGVSVITPGTNTSNQVAVLYQDVNCTEVPVAIHADQLTPTWRVYSTGSNVFQTRAGCLIGAEHVNNSYECDIPIGAGICASYQTQTNSPGSASSVASQSIIAYTMSLGAENSVAYSNNSIAIPTNFTISVTTEILPVSMTKTSVDCTMYICGDSTECSNLLLQYGSFCTQLNRALTGIAVEQDKNTQEVFAQVKQIYKTPPIKDFGGFNFSQILPDPSKPSKRSFIEDLLFNKVTLADAGFIKQYGDCLGDIAARDLICAQKFNGLTVLPPLLTDEMIAQYTSALLAGTITSGWTFGAGAALQIPFAMQMAYRFNGIGVTQNVLYENQKLIANQFNSAIGKIQDSLSSTASALGKLQDVVNQNAQALNTLVKQLSSNFGAISSVLNDILSRLDPPEAEVQIDRLITGRLQSLQTYVTQQLIRAAEIRASANLAATKMSECVLGQSKRVDFCGKGYHLMSFPQSAPHGVVFLHVTYVPAQEKNFTTAPAICHDGKAHFPREGVFVSNGTHWFVTQRNFYEPQIITTDNTFVSGNCDVVIGIVNNTVYDPLQSELDSIKEELDKIHKNGSGGSGDIIKLLNEQVNKEMQSSNLYMSMSSWCYTHSLDGAGLFLFDHAAEEYEHAKKLIIFLNENNVPVQLTSISAPEHKFEGLTQIFQKAYEHEQHISESINNIVDHAIKSKDHATFNFLQWYVAEQHEEEVLFKDILDKIELIGNENHGLYLADQYVKGIAKSRKSGS

SEQ ID NO: 295 - protein, 1723 aa, synthetic construct
NITNLCPFDEVFNATRFASVYAWNRKRISNCVADYSVLYNFAPFFAFKCYGVSPTKLNDLCFTNVYADSFVIRGNEVSQIAPGQTGNIADYNYKLPDDFTGCVIAWNSNKLDSKVGGNYNYQYRLFRKSNLKPFERDISTEIYQAGNKPCNGVAGFNCYFPLRSYGFRPTYGVGHQPYRVVVLSFELLHAPATVCGPGSGGSGNITNLCPFDEVFNATRFASVYAWNRKRISNCVADYSVLYNFAPFFAFKCYGVSPTKLNDLCFTNVYADSFVIRGNEVSQIAPGQTGNIADYNYKLPDDFTGCVIAWNSNKLDSKVGGNYNYRYRLFRKSNLKPFERDISTEIYQAGNKPCNGVAGVNCYFPLQSYGFRPTYGVGHQPYRVVVLSFELLHAPATVCGPGSGGSGSSQCVNLTTRTQLPPAYTNSFTRGVYYPDKVFRSSVLHSTQDLFLPFFSNVTWFHAIHVSGTNGTKRFDNPVLPFNDGVYFASTEKSNIIRGWIFGTTLDSKTQSLLIVNNATNVVIKVCEFQFCNDPFLGVYYHKNNKSWMESEFRVYSSANNCTFEYVSQPFLMDLEGKQGNFKNLREFVFKNIDGYFKIYSKHTPINLVRDLPQGFSALEPLVDLPIGINITRFQTLLALHRSYLTPGDSSSGWTAGAAAYYVGYLQPRTFLLKYNENGTITDAVDCALDPLSETKCTLKSFTVEKGIYQTSNFRVQPTESIVRFPNITNLCPFGEVFNATKFPSVYAWERKKISNCVADYSVLYNSTFFSTFKCYGVSATKLNDLCFSNVYADSFVVKGDDVRQIAPGQTGVIADYNYKLPDDFMGCVLAWNTRNIDATSTGNYNYKYRYLRHGKLRPFERDISNVPFSPDGKPCTPPALNCYWPLNDYGFYTTTGIGYQPYRVVVLSFELLNAPATVCGPKKSTNLVKNKCVNFNFNGLTGTGVLTESNKKFLPFQQFGRDIADTTDAVRDPQTLEILDITPCSFGGVSVITPGTNTSNQVAVLYQDVNCTEVPVAIHADQLTPTWRVYSTGSNVFQTRAGCLIGAEHVNNSYECDIPIGAGICASYQTQTNSPGSASSVASQSIIAYTMSLGAENSVAYSNNSIAIPTNFTISVTTEILPVSMTKTSVDCTMYICGDSTECSNLLLQYGSFCTQLNRALTGIAVEQDKNTQEVFAQVKQIYKTPPIKDFGGFNFSQILPDPSKPSKRSFIEDLLFNKVTLADAGFIKQYGDCLGDIAARDLICAQKFNGLTVLPPLLTDEMIAQYTSALLAGTITSGWTFGAGAALQIPFAMQMAYRFNGIGVTQNVLYENQKLIANQFNSAIGKIQDSLSSTASALGKLQDVVNQNAQALNTLVKQLSSNFGAISSVLNDILSRLDPPEAEVQIDRLITGRLQSLQTYVTQQLIRAAEIRASANLAATKMSECVLGQSKRVDFCGKGYHLMSFPQSAPHGVVFLHVTYVPAQEKNFTTAPAICHDGKAHFPREGVFVSNGTHWFVTQRNFYEPQIITTDNTFVSGNCDVVIGIVNNTVYDPLQSELDSIKEELDKIHKNGSGGSGDIIKLLNEQVNKEMQSSNLYMSMSSWCYTHSLDGAGLFLFDHAAEEYEHAKKLIIFLNENNVPVQLTSISAPEHKFEGLTQIFQKAYEHEQHISESINNIVDHAIKSKDHATFNFLQWYVAEQHEEEVLFKDILDKIELIGNENHGLYLADQYVKGIAKSRKSGS

SEQ ID NO: 296 - protein, 1719 aa, synthetic construct
NITQLCPFNEVFNITSFPSVYAWERMRITNCVADYSVLYNSSASFSTFQCYGVSPTKLNDLCFSSVYADYFVVKGDDVRQIAPAQTGVIADYNYKLPDDFTGCVIAWNTNSLDSSNEFFYRRFRHGKIKPYGRDLSNVLFNPSGGTCSAEGLNCYKPLASYGFTQSSGIGFQPYRVVVLSFELLNAPATVCGPGSGGSGNITNLCPFDEVFNATRFASVYAWNRKRISNCVADYSVLYNFAPFFAFKCYGVSPTKLNDLCFTNVYADSFVIRGNEVSQIAPGQTGNIADYNYKLPDDFTGCVIAWNSNKLDSKVGGNYNYRYRLFRKSNLKPFERDISTEIYQAGNKPCNGVAGVNCYFPLQSYGFRPTYGVGHQPYRVVVLSFELLHAPATVCGPGSGGSGSSQCVNLTTRTQLPPAYTNSFTRGVYYPDKVFRSSVLHSTQDLFLPFFSNVTWFHAIHVSGTNGTKRFDNPVLPFNDGVYFASTEKSNIIRGWIFGTTLDSKTQSLLIVNNATNVVIKVCEFQFCNDPFLGVYYHKNNKSWMESEFRVYSSANNCTFEYVSQPFLMDLEGKQGNFKNLREFVFKNIDGYFKIYSKHTPINLVRDLPQGFSALEPLVDLPIGINITRFQTLLALHRSYLTPGDSSSGWTAGAAAYYVGYLQPRTFLLKYNENGTITDAVDCALDPLSETKCTLKSFTVEKGIYQTSNFRVQPTESIVRFPNITNLCPFGEVFNATKFPSVYAWERKKISNCVADYSVLYNSTFFSTFKCYGVSATKLNDLCFSNVYADSFVVKGDDVRQIAPGQTGVIADYNYKLPDDFMGCVLAWNTRNIDATSTGNYNYKYRYLRHGKLRPFERDISNVPFSPDGKPCTPPALNCYWPLNDYGFYTTTGIGYQPYRVVVLSFELLNAPATVCGPKKSTNLVKNKCVNFNFNGLTGTGVLTESNKKFLPFQQFGRDIADTTDAVRDPQTLEILDITPCSFGGVSVITPGTNTSNQVAVLYQDVNCTEVPVAIHADQLTPTWRVYSTGSNVFQTRAGCLIGAEHVNNSYECDIPIGAGICASYQTQTNSPGSASSVASQSIIAYTMSLGAENSVAYSNNSIAIPTNFTISVTTEILPVSMTKTSVDCTMYICGDSTECSNLLLQYGSFCTQLNRALTGIAVEQDKNTQEVFAQVKQIYKTPPIKDFGGFNFSQILPDPSKPSKRSFIEDLLFNKVTLADAGFIKQYGDCLGDIAARDLICAQKFNGLTVLPPLLTDEMIAQYTSALLAGTITSGWTFGAGAALQIPFAMQMAYRFNGIGVTQNVLYENQKLIANQFNSAIGKIQDSLSSTASALGKLQDVVNQNAQALNTLVKQLSSNFGAISSVLNDILSRLDPPEAEVQIDRLITGRLQSLQTYVTQQLIRAAEIRASANLAATKMSECVLGQSKRVDFCGKGYHLMSFPQSAPHGVVFLHVTYVPAQEKNFTTAPAICHDGKAHFPREGVFVSNGTHWFVTQRNFYEPQIITTDNTFVSGNCDVVIGIVNNTVYDPLQSELDSIKEELDKIHKNGSGGSGDIIKLLNEQVNKEMQSSNLYMSMSSWCYTHSLDGAGLFLFDHAAEEYEHAKKLIIFLNENNVPVQLTSISAPEHKFEGLTQIFQKAYEHEQHISESINNIVDHAIKSKDHATFNFLQWYVAEQHEEEVLFKDILDKIELIGNENHGLYLADQYVKGIAKSRKSGS

SEQ ID NO: 297 - protein, 1719 aa, synthetic construct
NITQLCPFNEVFNITSFPSVYAWERMRITNCVADYSVLYNSSASFSTFQCYGVSPTKLNDLCFSSVYADYFVVKGDDVRQIAPAQTGVIADYNYKLPDDFTGCVIAWNTNSLDSSNEFFYRRFRHGKIKPYGRDLSNVLFNPSGGTCSAEGLNCYKPLASYGFWQSSGIGFQPYRVVVLSFELLNAPATVCGPGSGGSGNITNLCPFDEVFNATRFASVYAWNRKRISNCVADYSVLYNFAPFFAFKCYGVSPTKLNDLCFTNVYADSFVIRGNEVSQIAPGQTGNIADYNYKLPDDFTGCVIAWNSNKLDSKVGGNYNYRYRLFRKSNLKPFERDISTEIYQAGNKPCNGVAGVNCYFPLQSYGFRPTYGVGHQPYRVVVLSFELLHAPATVCGPGSGGSGSSQCVNLTTRTQLPPAYTNSFTRGVYYPDKVFRSSVLHSTQDLFLPFFSNVTWFHAIHVSGTNGTKRFDNPVLPFNDGVYFASTEKSNIIRGWIFGTTLDSKTQSLLIVNNATNVVIKVCEFQFCNDPFLGVYYHKNNKSWMESEFRVYSSANNCTFEYVSQPFLMDLEGKQGNFKNLREFVFKNIDGYFKIYSKHTPINLVRDLPQGFSALEPLVDLPIGINITRFQTLLALHRSYLTPGDSSSGWTAGAAAYYVGYLQPRTFLLKYNENGTITDAVDCALDPLSETKCTLKSFTVEKGIYQTSNFRVQPTESIVRFPNITNLCPFGEVFNATKFPSVYAWERKKISNCVADYSVLYNSTFFSTFKCYGVSATKLNDLCFSNVYADSFVVKGDDVRQIAPGQTGVIADYNYKLPDDFMGCVLAWNTRNIDATSTGNYNYKYRYLRHGKLRPFERDISNVPFSPDGKPCTPPALNCYWPLNDYGFYTTTGIGYQPYRVVVLSFELLNAPATVCGPKKSTNLVKNKCVNFNFNGLTGTGVLTESNKKFLPFQQFGRDIADTTDAVRDPQTLEILDITPCSFGGVSVITPGTNTSNQVAVLYQDVNCTEVPVAIHADQLTPTWRVYSTGSNVFQTRAGCLIGAEHVNNSYECDIPIGAGICASYQTQTNSPGSASSVASQSIIAYTMSLGAENSVAYSNNSIAIPTNFTISVTTEILPVSMTKTSVDCTMYICGDSTECSNLLLQYGSFCTQLNRALTGIAVEQDKNTQEVFAQVKQIYKTPPIKDFGGFNFSQILPDPSKPSKRSFIEDLLFNKVTLADAGFIKQYGDCLGDIAARDLICAQKFNGLTVLPPLLTDEMIAQYTSALLAGTITSGWTFGAGAALQIPFAMQMAYRFNGIGVTQNVLYENQKLIANQFNSAIGKIQDSLSSTASALGKLQDVVNQNAQALNTLVKQLSSNFGAISSVLNDILSRLDPPEAEVQIDRLITGRLQSLQTYVTQQLIRAAEIRASANLAATKMSECVLGQSKRVDFCGKGYHLMSFPQSAPHGVVFLHVTYVPAQEKNFTTAPAICHDGKAHFPREGVFVSNGTHWFVTQRNFYEPQIITTDNTFVSGNCDVVIGIVNNTVYDPLQSELDSIKEELDKIHKNGSGGSGDIIKLLNEQVNKEMQSSNLYMSMSSWCYTHSLDGAGLFLFDHAAEEYEHAKKLIIFLNENNVPVQLTSISAPEHKFEGLTQIFQKAYEHEQHISESINNIVDHAIKSKDHATFNFLQWYVAEQHEEEVLFKDILDKIELIGNENHGLYLADQYVKGIAKSRKSGS

SEQ ID NO: 298 - protein, 1719 aa, synthetic construct
NITQLCPFNEVFNITSFPSVYAWERMRITNCVADYSVLYNSSASFSTFQCYGVSPTKLNDLCFSSVYADYFVVKGDDVRQIAPAQTGVIADYNYKLPDDFTGCVIAWNTNSLDSSNEFFYRRFRHGKIKPYGRDLSNVLFNPSGGTCSAEGLNCYKPLYSYGFWQSSGIGFQPYRVVVLSFELLNAPATVCGPGSGGSGNITNLCPFDEVFNATRFASVYAWNRKRISNCVADYSVLYNFAPFFAFKCYGVSPTKLNDLCFTNVYADSFVIRGNEVSQIAPGQTGNIADYNYKLPDDFTGCVIAWNSNKLDSKVGGNYNYRYRLFRKSNLKPFERDISTEIYQAGNKPCNGVAGVNCYFPLQSYGFRPTYGVGHQPYRVVVLSFELLHAPATVCGPGSGGSGSSQCVNLTTRTQLPPAYTNSFTRGVYYPDKVFRSSVLHSTQDLFLPFFSNVTWFHAIHVSGTNGTKRFDNPVLPFNDGVYFASTEKSNIIRGWIFGTTLDSKTQSLLIVNNATNVVIKVCEFQFCNDPFLGVYYHKNNKSWMESEFRVYSSANNCTFEYVSQPFLMDLEGKQGNFKNLREFVFKNIDGYFKIYSKHTPINLVRDLPQGFSALEPLVDLPIGINITRFQTLLALHRSYLTPGDSSSGWTAGAAAYYVGYLQPRTFLLKYNENGTITDAVDCALDPLSETKCTLKSFTVEKGIYQTSNFRVQPTESIVRFPNITNLCPFGEVFNATKFPSVYAWERKKISNCVADYSVLYNSTFFSTFKCYGVSATKLNDLCFSNVYADSFVVKGDDVRQIAPGQTGVIADYNYKLPDDFMGCVLAWNTRNIDATSTGNYNYKYRYLRHGKLRPFERDISNVPFSPDGKPCTPPALNCYWPLNDYGFYTTTGIGYQPYRVVVLSFELLNAPATVCGPKKSTNLVKNKCVNFNFNGLTGTGVLTESNKKFLPFQQFGRDIADTTDAVRDPQTLEILDITPCSFGGVSVITPGTNTSNQVAVLYQDVNCTEVPVAIHADQLTPTWRVYSTGSNVFQTRAGCLIGAEHVNNSYECDIPIGAGICASYQTQTNSPGSASSVASQSIIAYTMSLGAENSVAYSNNSIAIPTNFTISVTTEILPVSMTKTSVDCTMYICGDSTECSNLLLQYGSFCTQLNRALTGIAVEQDKNTQEVFAQVKQIYKTPPIKDFGGFNFSQILPDPSKPSKRSFIEDLLFNKVTLADAGFIKQYGDCLGDIAARDLICAQKFNGLTVLPPLLTDEMIAQYTSALLAGTITSGWTFGAGAALQIPFAMQMAYRFNGIGVTQNVLYENQKLIANQFNSAIGKIQDSLSSTASALGKLQDVVNQNAQALNTLVKQLSSNFGAISSVLNDILSRLDPPEAEVQIDRLITGRLQSLQTYVTQQLIRAAEIRASANLAATKMSECVLGQSKRVDFCGKGYHLMSFPQSAPHGVVFLHVTYVPAQEKNFTTAPAICHDGKAHFPREGVFVSNGTHWFVTQRNFYEPQIITTDNTFVSGNCDVVIGIVNNTVYDPLQSELDSIKEELDKIHKNGSGGSGDIIKLLNEQVNKEMQSSNLYMSMSSWCYTHSLDGAGLFLFDHAAEEYEHAKKLIIFLNENNVPVQLTSISAPEHKFEGLTQIFQKAYEHEQHISESINNIVDHAIKSKDHATFNFLQWYVAEQHEEEVLFKDILDKIELIGNENHGLYLADQYVKGIAKSRKSGS

SEQ ID NO: 299 - protein, 1722 aa, synthetic construct
NITNLCPFGEVFNATTFPSVYAWERKRISNCVADYSVLYNSTSFSTFKCYGVSATKLNDLCFSNVYADSFVVKGDDVRQIAPGQTGVIADYNYKLPDDFLGCVLAWNTNSKDSSTSGNYNYLYRWVRRSKLNPYERDLSNDIYSPGGQSCSAVGPNCYNPLRPYGFFTTAGVGHQPYRVVVLSFELLNAPATVCGPGSGGSGNITNLCPFDEVFNATRFASVYAWNRKRISNCVADYSVLYNFAPFFAFKCYGVSPTKLNDLCFTNVYADSFVIRGNEVSQIAPGQTGNIADYNYKLPDDFTGCVIAWNSNKLDSKVGGNYNYRYRLFRKSNLKPFERDISTEIYQAGNKPCNGVAGVNCYFPLQSYGFRPTYGVGHQPYRVVVLSFELLHAPATVCGPGSGGSGSSQCVNLTTRTQLPPAYTNSFTRGVYYPDKVFRSSVLHSTQDLFLPFFSNVTWFHAIHVSGTNGTKRFDNPVLPFNDGVYFASTEKSNIIRGWIFGTTLDSKTQSLLIVNNATNVVIKVCEFQFCNDPFLGVYYHKNNKSWMESEFRVYSSANNCTFEYVSQPFLMDLEGKQGNFKNLREFVFKNIDGYFKIYSKHTPINLVRDLPQGFSALEPLVDLPIGINITRFQTLLALHRSYLTPGDSSSGWTAGAAAYYVGYLQPRTFLLKYNENGTITDAVDCALDPLSETKCTLKSFTVEKGIYQTSNFRVQPTESIVRFPNITNLCPFGEVFNATKFPSVYAWERKKISNCVADYSVLYNSTFFSTFKCYGVSATKLNDLCFSNVYADSFVVKGDDVRQIAPGQTGVIADYNYKLPDDFMGCVLAWNTRNIDATSTGNYNYKYRYLRHGKLRPFERDISNVPFSPDGKPCTPPALNCYWPLNDYGFYTTTGIGYQPYRVVVLSFELLNAPATVCGPKKSTNLVKNKCVNFNFNGLTGTGVLTESNKKFLPFQQFGRDIADTTDAVRDPQTLEILDITPCSFGGVSVITPGTNTSNQVAVLYQDVNCTEVPVAIHADQLTPTWRVYSTGSNVFQTRAGCLIGAEHVNNSYECDIPIGAGICASYQTQTNSPGSASSVASQSIIAYTMSLGAENSVAYSNNSIAIPTNFTISVTTEILPVSMTKTSVDCTMYICGDSTECSNLLLQYGSFCTQLNRALTGIAVEQDKNTQEVFAQVKQIYKTPPIKDFGGFNFSQILPDPSKPSKRSFIEDLLFNKVTLADAGFIKQYGDCLGDIAARDLICAQKFNGLTVLPPLLTDEMIAQYTSALLAGTITSGWTFGAGAALQIPFAMQMAYRFNGIGVTQNVLYENQKLIANQFNSAIGKIQDSLSSTASALGKLQDVVNQNAQALNTLVKQLSSNFGAISSVLNDILSRLDPPEAEVQIDRLITGRLQSLQTYVTQQLIRAAEIRASANLAATKMSECVLGQSKRVDFCGKGYHLMSFPQSAPHGVVFLHVTYVPAQEKNFTTAPAICHDGKAHFPREGVFVSNGTHWFVTQRNFYEPQIITTDNTFVSGNCDVVIGIVNNTVYDPLQSELDSIKEELDKIHKNGSGGSGDIIKLLNEQVNKEMQSSNLYMSMSSWCYTHSLDGAGLFLFDHAAEEYEHAKKLIIFLNENNVPVQLTSISAPEHKFEGLTQIFQKAYEHEQHISESINNIVDHAIKSKDHATFNFLQWYVAEQHEEEVLFKDILDKIELIGNENHGLYLADQYVKGIAKSRKSGS

SEQ ID NO: 300 - protein, 1722 aa, synthetic construct
NITNLCPFGEVFNATTFPSVYAWERKRISNCVADYSVLYNSTSFSTFKCYGVSATKLNDLCFSNVYADSFVVKGDDVRQIAPGQTGVIADYNYKLPDDFTGCVLAWNTRNIDATQTGNYNYKYRSLRHGKLRPFERDISNVPFSPDGKPCTPPAFNCYWPLNDYGFYITNGIGYQPYRVVVLSFELLNAPATVCGPGSGGSGNITNLCPFDEVFNATRFASVYAWNRKRISNCVADYSVLYNFAPFFAFKCYGVSPTKLNDLCFTNVYADSFVIRGNEVSQIAPGQTGNIADYNYKLPDDFTGCVIAWNSNKLDSKVGGNYNYRYRLFRKSNLKPFERDISTEIYQAGNKPCNGVAGVNCYFPLQSYGFRPTYGVGHQPYRVVVLSFELLHAPATVCGPGSGGSGSSQCVNLTTRTQLPPAYTNSFTRGVYYPDKVFRSSVLHSTQDLFLPFFSNVTWFHAIHVSGTNGTKRFDNPVLPFNDGVYFASTEKSNIIRGWIFGTTLDSKTQSLLIVNNATNVVIKVCEFQFCNDPFLGVYYHKNNKSWMESEFRVYSSANNCTFEYVSQPFLMDLEGKQGNFKNLREFVFKNIDGYFKIYSKHTPINLVRDLPQGFSALEPLVDLPIGINITRFQTLLALHRSYLTPGDSSSGWTAGAAAYYVGYLQPRTFLLKYNENGTITDAVDCALDPLSETKCTLKSFTVEKGIYQTSNFRVQPTESIVRFPNITNLCPFGEVFNATKFPSVYAWERKKISNCVADYSVLYNSTFFSTFKCYGVSATKLNDLCFSNVYADSFVVKGDDVRQIAPGQTGVIADYNYKLPDDFMGCVLAWNTRNIDATSTGNYNYKYRYLRHGKLRPFERDISNVPFSPDGKPCTPPALNCYWPLNDYGFYTTTGIGYQPYRVVVLSFELLNAPATVCGPKKSTNLVKNKCVNFNFNGLTGTGVLTESNKKFLPFQQFGRDIADTTDAVRDPQTLEILDITPCSFGGVSVITPGTNTSNQVAVLYQDVNCTEVPVAIHADQLTPTWRVYSTGSNVFQTRAGCLIGAEHVNNSYECDIPIGAGICASYQTQTNSPGSASSVASQSIIAYTMSLGAENSVAYSNNSIAIPTNFTISVTTEILPVSMTKTSVDCTMYICGDSTECSNLLLQYGSFCTQLNRALTGIAVEQDKNTQEVFAQVKQIYKTPPIKDFGGFNFSQILPDPSKPSKRSFIEDLLFNKVTLADAGFIKQYGDCLGDIAARDLICAQKFNGLTVLPPLLTDEMIAQYTSALLAGTITSGWTFGAGAALQIPFAMQMAYRFNGIGVTQNVLYENQKLIANQFNSAIGKIQDSLSSTASALGKLQDVVNQNAQALNTLVKQLSSNFGAISSVLNDILSRLDPPEAEVQIDRLITGRLQSLQTYVTQQLIRAAEIRASANLAATKMSECVLGQSKRVDFCGKGYHLMSFPQSAPHGVVFLHVTYVPAQEKNFTTAPAICHDGKAHFPREGVFVSNGTHWFVTQRNFYEPQIITTDNTFVSGNCDVVIGIVNNTVYDPLQSELDSIKEELDKIHKNGSGGSGDIIKLLNEQVNKEMQSSNLYMSMSSWCYTHSLDGAGLFLFDHAAEEYEHAKKLIIFLNENNVPVQLTSISAPEHKFEGLTQIFQKAYEHEQHISESINNIVDHAIKSKDHATFNFLQWYVAEQHEEEVLFKDILDKIELIGNENHGLYLADQYVKGIAKSRKSGS

SEQ ID NO: 301 - protein, 1704 aa, synthetic construct
NITNVCPFHKVFNATRFPSVYAWERTKISDCIADYTVFYNSTSFSTFKCYGVSPSKLIDLCFTSVYADTFLIRFSEVRQVAPGQTGVIADYNYKLPDDFTGCVIAWNTAKQDTGHYFYRSHRSTKLKPFERDLSSDENGVRTLSTYDFNPNVPLEYQATRVVVLSFELLNAPATVCGPGSGGSGNITNLCPFDEVFNATRFASVYAWNRKRISNCVADYSVLYNFAPFFAFKCYGVSPTKLNDLCFTNVYADSFVIRGNEVSQIAPGQTGNIADYNYKLPDDFTGCVIAWNSNKLDSKVGGNYNYRYRLFRKSNLKPFERDISTEIYQAGNKPCNGVAGVNCYFPLQSYGFRPTYGVGHQPYRVVVLSFELLHAPATVCGPGSGGSGSSQCVNLTTRTQLPPAYTNSFTRGVYYPDKVFRSSVLHSTQDLFLPFFSNVTWFHAIHVSGTNGTKRFDNPVLPFNDGVYFASTEKSNIIRGWIFGTTLDSKTQSLLIVNNATNVVIKVCEFQFCNDPFLGVYYHKNNKSWMESEFRVYSSANNCTFEYVSQPFLMDLEGKQGNFKNLREFVFKNIDGYFKIYSKHTPINLVRDLPQGFSALEPLVDLPIGINITRFQTLLALHRSYLTPGDSSSGWTAGAAAYYVGYLQPRTFLLKYNENGTITDAVDCALDPLSETKCTLKSFTVEKGIYQTSNFRVQPTESIVRFPNITNLCPFGEVFNATKFPSVYAWERKKISNCVADYSVLYNSTFFSTFKCYGVSATKLNDLCFSNVYADSFVVKGDDVRQIAPGQTGVIADYNYKLPDDFMGCVLAWNTRNIDATSTGNYNYKYRYLRHGKLRPFERDISNVPFSPDGKPCTPPALNCYWPLNDYGFYTTTGIGYQPYRVVVLSFELLNAPATVCGPKKSTNLVKNKCVNFNFNGLTGTGVLTESNKKFLPFQQFGRDIADTTDAVRDPQTLEILDITPCSFGGVSVITPGTNTSNQVAVLYQDVNCTEVPVAIHADQLTPTWRVYSTGSNVFQTRAGCLIGAEHVNNSYECDIPIGAGICASYQTQTNSPGSASSVASQSIIAYTMSLGAENSVAYSNNSIAIPTNFTISVTTEILPVSMTKTSVDCTMYICGDSTECSNLLLQYGSFCTQLNRALTGIAVEQDKNTQEVFAQVKQIYKTPPIKDFGGFNFSQILPDPSKPSKRSFIEDLLFNKVTLADAGFIKQYGDCLGDIAARDLICAQKFNGLTVLPPLLTDEMIAQYTSALLAGTITSGWTFGAGAALQIPFAMQMAYRFNGIGVTQNVLYENQKLIANQFNSAIGKIQDSLSSTASALGKLQDVVNQNAQALNTLVKQLSSNFGAISSVLNDILSRLDPPEAEVQIDRLITGRLQSLQTYVTQQLIRAAEIRASANLAATKMSECVLGQSKRVDFCGKGYHLMSFPQSAPHGVVFLHVTYVPAQEKNFTTAPAICHDGKAHFPREGVFVSNGTHWFVTQRNFYEPQIITTDNTFVSGNCDVVIGIVNNTVYDPLQSELDSIKEELDKIHKNGSGGSGDIIKLLNEQVNKEMQSSNLYMSMSSWCYTHSLDGAGLFLFDHAAEEYEHAKKLIIFLNENNVPVQLTSISAPEHKFEGLTQIFQKAYEHEQHISESINNIVDHAIKSKDHATFNFLQWYVAEQHEEEVLFKDILDKIELIGNENHGLYLADQYVKGIAKSRKSGS

SEQ ID NO: 302 - protein, 1723 aa, synthetic construct
NITNLCPFGEVFNATTFASVYAWNRKRISNCVADYSVLYNSTSFSTFKCYGVSPTKLNDLCFTNVYADSFVVRGDEVRQIAPGQTGKIADYNYKLPDDFTGCVIAWNSNNLDSKVGGNYNYLYRLFRKSNLKPFERDISTEIYQAGSTPCNGVEGFNCYFPLQSYGFHPTNGVGYQPYRVVVLSFELLNAPATVCGPGSGGSGNITNLCPFDEVFNATRFASVYAWNRKRISNCVADYSVLYNFAPFFAFKCYGVSPTKLNDLCFTNVYADSFVIRGNEVSQIAPGQTGNIADYNYKLPDDFTGCVIAWNSNKLDSKVGGNYNYRYRLFRKSNLKPFERDISTEIYQAGNKPCNGVAGVNCYFPLQSYGFRPTYGVGHQPYRVVVLSFELLHAPATVCGPGSGGSGSSQCVNLTTRTQLPPAYTNSFTRGVYYPDKVFRSSVLHSTQDLFLPFFSNVTWFHAIHVSGTNGTKRFDNPVLPFNDGVYFASTEKSNIIRGWIFGTTLDSKTQSLLIVNNATNVVIKVCEFQFCNDPFLGVYYHKNNKSWMESEFRVYSSANNCTFEYVSQPFLMDLEGKQGNFKNLREFVFKNIDGYFKIYSKHTPINLVRDLPQGFSALEPLVDLPIGINITRFQTLLALHRSYLTPGDSSSGWTAGAAAYYVGYLQPRTFLLKYNENGTITDAVDCALDPLSETKCTLKSFTVEKGIYQTSNFRVQPTESIVRFPNITNLCPFGEVFNATKFPSVYAWERKKISNCVADYSVLYNSTFFSTFKCYGVSATKLNDLCFSNVYADSFVVKGDDVRQIAPGQTGVIADYNYKLPDDFMGCVLAWNTRNIDATSTGNYNYKYRYLRHGKLRPFERDISNVPFSPDGKPCTPPALNCYWPLNDYGFYTTTGIGYQPYRVVVLSFELLNAPATVCGPKKSTNLVKNKCVNFNFNGLTGTGVLTESNKKFLPFQQFGRDIADTTDAVRDPQTLEILDITPCSFGGVSVITPGTNTSNQVAVLYQDVNCTEVPVAIHADQLTPTWRVYSTGSNVFQTRAGCLIGAEHVNNSYECDIPIGAGICASYQTQTNSPGSASSVASQSIIAYTMSLGAENSVAYSNNSIAIPTNFTISVTTEILPVSMTKTSVDCTMYICGDSTECSNLLLQYGSFCTQLNRALTGIAVEQDKNTQEVFAQVKQIYKTPPIKDFGGFNFSQILPDPSKPSKRSFIEDLLFNKVTLADAGFIKQYGDCLGDIAARDLICAQKFNGLTVLPPLLTDEMIAQYTSALLAGTITSGWTFGAGAALQIPFAMQMAYRFNGIGVTQNVLYENQKLIANQFNSAIGKIQDSLSSTASALGKLQDVVNQNAQALNTLVKQLSSNFGAISSVLNDILSRLDPPEAEVQIDRLITGRLQSLQTYVTQQLIRAAEIRASANLAATKMSECVLGQSKRVDFCGKGYHLMSFPQSAPHGVVFLHVTYVPAQEKNFTTAPAICHDGKAHFPREGVFVSNGTHWFVTQRNFYEPQIITTDNTFVSGNCDVVIGIVNNTVYDPLQSELDSIKEELDKIHKNGSGGSGDIIKLLNEQVNKEMQSSNLYMSMSSWCYTHSLDGAGLFLFDHAAEEYEHAKKLIIFLNENNVPVQLTSISAPEHKFEGLTQIFQKAYEHEQHISESINNIVDHAIKSKDHATFNFLQWYVAEQHEEEVLFKDILDKIELIGNENHGLYLADQYVKGIAKSRKSGS

SEQ ID NO: 303 - protein, 1723 aa, synthetic construct
NITNLCPFGEVFNATTFASVYAWNRKRISNCVADYSVLYNSTSFSTFKCYGVSPTKLNDLCFTNVYADSFVITGDEVRQIAPGQTGKIADYNYKLPDDFTGCVIAWNSKHIDAKEGGNFNYLYRLFRKANLKPFERDISTEIYQAGSKPCNGQTGLNCYYPLYRYGFYPTDGVGHQPYRVVVLSFELLNAPATVCGPGSGGSGNITNLCPFDEVFNATRFASVYAWNRKRISNCVADYSVLYNFAPFFAFKCYGVSPTKLNDLCFTNVYADSFVIRGNEVSQIAPGQTGNIADYNYKLPDDFTGCVIAWNSNKLDSKVGGNYNYRYRLFRKSNLKPFERDISTEIYQAGNKPCNGVAGVNCYFPLQSYGFRPTYGVGHQPYRVVVLSFELLHAPATVCGPGSGGSGSSQCVNLTTRTQLPPAYTNSFTRGVYYPDKVFRSSVLHSTQDLFLPFFSNVTWFHAIHVSGTNGTKRFDNPVLPFNDGVYFASTEKSNIIRGWIFGTTLDSKTQSLLIVNNATNVVIKVCEFQFCNDPFLGVYYHKNNKSWMESEFRVYSSANNCTFEYVSQPFLMDLEGKQGNFKNLREFVFKNIDGYFKIYSKHTPINLVRDLPQGFSALEPLVDLPIGINITRFQTLLALHRSYLTPGDSSSGWTAGAAAYYVGYLQPRTFLLKYNENGTITDAVDCALDPLSETKCTLKSFTVEKGIYQTSNFRVQPTESIVRFPNITNLCPFGEVFNATKFPSVYAWERKKISNCVADYSVLYNSTFFSTFKCYGVSATKLNDLCFSNVYADSFVVKGDDVRQIAPGQTGVIADYNYKLPDDFMGCVLAWNTRNIDATSTGNYNYKYRYLRHGKLRPFERDISNVPFSPDGKPCTPPALNCYWPLNDYGFYTTTGIGYQPYRVVVLSFELLNAPATVCGPKKSTNLVKNKCVNFNFNGLTGTGVLTESNKKFLPFQQFGRDIADTTDAVRDPQTLEILDITPCSFGGVSVITPGTNTSNQVAVLYQDVNCTEVPVAIHADQLTPTWRVYSTGSNVFQTRAGCLIGAEHVNNSYECDIPIGAGICASYQTQTNSPGSASSVASQSIIAYTMSLGAENSVAYSNNSIAIPTNFTISVTTEILPVSMTKTSVDCTMYICGDSTECSNLLLQYGSFCTQLNRALTGIAVEQDKNTQEVFAQVKQIYKTPPIKDFGGFNFSQILPDPSKPSKRSFIEDLLFNKVTLADAGFIKQYGDCLGDIAARDLICAQKFNGLTVLPPLLTDEMIAQYTSALLAGTITSGWTFGAGAALQIPFAMQMAYRFNGIGVTQNVLYENQKLIANQFNSAIGKIQDSLSSTASALGKLQDVVNQNAQALNTLVKQLSSNFGAISSVLNDILSRLDPPEAEVQIDRLITGRLQSLQTYVTQQLIRAAEIRASANLAATKMSECVLGQSKRVDFCGKGYHLMSFPQSAPHGVVFLHVTYVPAQEKNFTTAPAICHDGKAHFPREGVFVSNGTHWFVTQRNFYEPQIITTDNTFVSGNCDVVIGIVNNTVYDPLQSELDSIKEELDKIHKNGSGGSGDIIKLLNEQVNKEMQSSNLYMSMSSWCYTHSLDGAGLFLFDHAAEEYEHAKKLIIFLNENNVPVQLTSISAPEHKFEGLTQIFQKAYEHEQHISESINNIVDHAIKSKDHATFNFLQWYVAEQHEEEVLFKDILDKIELIGNENHGLYLADQYVKGIAKSRKSGS

SEQ ID NO: 304 - protein, 1704 aa, synthetic construct
NITNFCPFDKVFNATRFPNVYAWQRTKISDCIADYTVLYNSTSFSTFKCYGVSPSKLIDLCFTSVYADTFLIRFSEVRQIAPGETGVIADYNYKLPDDFTGCVLAWNTAQQDIGSYFYRSHRAVKLKPFERDLSSDENGVRTLSTYDFNPNVPLDYQATRVVVLSFELLNAPATVCGPGSGGSGNITNLCPFDEVFNATRFASVYAWNRKRISNCVADYSVLYNFAPFFAFKCYGVSPTKLNDLCFTNVYADSFVIRGNEVSQIAPGQTGNIADYNYKLPDDFTGCVIAWNSNKLDSKVGGNYNYRYRLFRKSNLKPFERDISTEIYQAGNKPCNGVAGVNCYFPLQSYGFRPTYGVGHQPYRVVVLSFELLHAPATVCGPGSGGSGSSQCVNLTTRTQLPPAYTNSFTRGVYYPDKVFRSSVLHSTQDLFLPFFSNVTWFHAIHVSGTNGTKRFDNPVLPFNDGVYFASTEKSNIIRGWIFGTTLDSKTQSLLIVNNATNVVIKVCEFQFCNDPFLGVYYHKNNKSWMESEFRVYSSANNCTFEYVSQPFLMDLEGKQGNFKNLREFVFKNIDGYFKIYSKHTPINLVRDLPQGFSALEPLVDLPIGINITRFQTLLALHRSYLTPGDSSSGWTAGAAAYYVGYLQPRTFLLKYNENGTITDAVDCALDPLSETKCTLKSFTVEKGIYQTSNFRVQPTESIVRFPNITNLCPFGEVFNATKFPSVYAWERKKISNCVADYSVLYNSTFFSTFKCYGVSATKLNDLCFSNVYADSFVVKGDDVRQIAPGQTGVIADYNYKLPDDFMGCVLAWNTRNIDATSTGNYNYKYRYLRHGKLRPFERDISNVPFSPDGKPCTPPALNCYWPLNDYGFYTTTGIGYQPYRVVVLSFELLNAPATVCGPKKSTNLVKNKCVNFNFNGLTGTGVLTESNKKFLPFQQFGRDIADTTDAVRDPQTLEILDITPCSFGGVSVITPGTNTSNQVAVLYQDVNCTEVPVAIHADQLTPTWRVYSTGSNVFQTRAGCLIGAEHVNNSYECDIPIGAGICASYQTQTNSPGSASSVASQSIIAYTMSLGAENSVAYSNNSIAIPTNFTISVTTEILPVSMTKTSVDCTMYICGDSTECSNLLLQYGSFCTQLNRALTGIAVEQDKNTQEVFAQVKQIYKTPPIKDFGGFNFSQILPDPSKPSKRSFIEDLLFNKVTLADAGFIKQYGDCLGDIAARDLICAQKFNGLTVLPPLLTDEMIAQYTSALLAGTITSGWTFGAGAALQIPFAMQMAYRFNGIGVTQNVLYENQKLIANQFNSAIGKIQDSLSSTASALGKLQDVVNQNAQALNTLVKQLSSNFGAISSVLNDILSRLDPPEAEVQIDRLITGRLQSLQTYVTQQLIRAAEIRASANLAATKMSECVLGQSKRVDFCGKGYHLMSFPQSAPHGVVFLHVTYVPAQEKNFTTAPAICHDGKAHFPREGVFVSNGTHWFVTQRNFYEPQIITTDNTFVSGNCDVVIGIVNNTVYDPLQSELDSIKEELDKIHKNGSGGSGDIIKLLNEQVNKEMQSSNLYMSMSSWCYTHSLDGAGLFLFDHAAEEYEHAKKLIIFLNENNVPVQLTSISAPEHKFEGLTQIFQKAYEHEQHISESINNIVDHAIKSKDHATFNFLQWYVAEQHEEEVLFKDILDKIELIGNENHGLYLADQYVKGIAKSRKSGS

SEQ ID NO: 305 - protein, 1704 aa, synthetic construct
NITNFCPFDKVFNATRFPNVYAWQRTKISDCIADYTVLYNSTSFSTFKCYGVSPSKLIDLCFTSVYADTFLIRFSEVRQIAPGETGVIADYNYKLPDDFTGCVLAWNTAQQDIGSYFYRSHRAVKLKPFERDLSSDENGVRTLSTYDFWPNVPLDYQATRVVVLSFELLNAPATVCGPGSGGSGNITNLCPFDEVFNATRFASVYAWNRKRISNCVADYSVLYNFAPFFAFKCYGVSPTKLNDLCFTNVYADSFVIRGNEVSQIAPGQTGNIADYNYKLPDDFTGCVIAWNSNKLDSKVGGNYNYRYRLFRKSNLKPFERDISTEIYQAGNKPCNGVAGVNCYFPLQSYGFRPTYGVGHQPYRVVVLSFELLHAPATVCGPGSGGSGSSQCVNLTTRTQLPPAYTNSFTRGVYYPDKVFRSSVLHSTQDLFLPFFSNVTWFHAIHVSGTNGTKRFDNPVLPFNDGVYFASTEKSNIIRGWIFGTTLDSKTQSLLIVNNATNVVIKVCEFQFCNDPFLGVYYHKNNKSWMESEFRVYSSANNCTFEYVSQPFLMDLEGKQGNFKNLREFVFKNIDGYFKIYSKHTPINLVRDLPQGFSALEPLVDLPIGINITRFQTLLALHRSYLTPGDSSSGWTAGAAAYYVGYLQPRTFLLKYNENGTITDAVDCALDPLSETKCTLKSFTVEKGIYQTSNFRVQPTESIVRFPNITNLCPFGEVFNATKFPSVYAWERKKISNCVADYSVLYNSTFFSTFKCYGVSATKLNDLCFSNVYADSFVVKGDDVRQIAPGQTGVIADYNYKLPDDFMGCVLAWNTRNIDATSTGNYNYKYRYLRHGKLRPFERDISNVPFSPDGKPCTPPALNCYWPLNDYGFYTTTGIGYQPYRVVVLSFELLNAPATVCGPKKSTNLVKNKCVNFNFNGLTGTGVLTESNKKFLPFQQFGRDIADTTDAVRDPQTLEILDITPCSFGGVSVITPGTNTSNQVAVLYQDVNCTEVPVAIHADQLTPTWRVYSTGSNVFQTRAGCLIGAEHVNNSYECDIPIGAGICASYQTQTNSPGSASSVASQSIIAYTMSLGAENSVAYSNNSIAIPTNFTISVTTEILPVSMTKTSVDCTMYICGDSTECSNLLLQYGSFCTQLNRALTGIAVEQDKNTQEVFAQVKQIYKTPPIKDFGGFNFSQILPDPSKPSKRSFIEDLLFNKVTLADAGFIKQYGDCLGDIAARDLICAQKFNGLTVLPPLLTDEMIAQYTSALLAGTITSGWTFGAGAALQIPFAMQMAYRFNGIGVTQNVLYENQKLIANQFNSAIGKIQDSLSSTASALGKLQDVVNQNAQALNTLVKQLSSNFGAISSVLNDILSRLDPPEAEVQIDRLITGRLQSLQTYVTQQLIRAAEIRASANLAATKMSECVLGQSKRVDFCGKGYHLMSFPQSAPHGVVFLHVTYVPAQEKNFTTAPAICHDGKAHFPREGVFVSNGTHWFVTQRNFYEPQIITTDNTFVSGNCDVVIGIVNNTVYDPLQSELDSIKEELDKIHKNGSGGSGDIIKLLNEQVNKEMQSSNLYMSMSSWCYTHSLDGAGLFLFDHAAEEYEHAKKLIIFLNENNVPVQLTSISAPEHKFEGLTQIFQKAYEHEQHISESINNIVDHAIKSKDHATFNFLQWYVAEQHEEEVLFKDILDKIELIGNENHGLYLADQYVKGIAKSRKSGS

SEQ ID NO: 306 - protein, 1704 aa, synthetic construct
NITNFCPFDKVFNATRFPNVYAWQRTKISDCIADYTVLYNSTSFSTFKCYGVSPSKLIDLCFTSVYADTFLIRFSEVRQIAPGETGVIADYNYKLPDDFTGCVLAWNTAQQDIGSYFYRSHRAVKLKPFERDLSSDENGVRTLYTYDFWPNVPLDYQATRVVVLSFELLNAPATVCGPGSGGSGNITNLCPFDEVFNATRFASVYAWNRKRISNCVADYSVLYNFAPFFAFKCYGVSPTKLNDLCFTNVYADSFVIRGNEVSQIAPGQTGNIADYNYKLPDDFTGCVIAWNSNKLDSKVGGNYNYRYRLFRKSNLKPFERDISTEIYQAGNKPCNGVAGVNCYFPLQSYGFRPTYGVGHQPYRVVVLSFELLHAPATVCGPGSGGSGSSQCVNLTTRTQLPPAYTNSFTRGVYYPDKVFRSSVLHSTQDLFLPFFSNVTWFHAIHVSGTNGTKRFDNPVLPFNDGVYFASTEKSNIIRGWIFGTTLDSKTQSLLIVNNATNVVIKVCEFQFCNDPFLGVYYHKNNKSWMESEFRVYSSANNCTFEYVSQPFLMDLEGKQGNFKNLREFVFKNIDGYFKIYSKHTPINLVRDLPQGFSALEPLVDLPIGINITRFQTLLALHRSYLTPGDSSSGWTAGAAAYYVGYLQPRTFLLKYNENGTITDAVDCALDPLSETKCTLKSFTVEKGIYQTSNFRVQPTESIVRFPNITNLCPFGEVFNATKFPSVYAWERKKISNCVADYSVLYNSTFFSTFKCYGVSATKLNDLCFSNVYADSFVVKGDDVRQIAPGQTGVIADYNYKLPDDFMGCVLAWNTRNIDATSTGNYNYKYRYLRHGKLRPFERDISNVPFSPDGKPCTPPALNCYWPLNDYGFYTTTGIGYQPYRVVVLSFELLNAPATVCGPKKSTNLVKNKCVNFNFNGLTGTGVLTESNKKFLPFQQFGRDIADTTDAVRDPQTLEILDITPCSFGGVSVITPGTNTSNQVAVLYQDVNCTEVPVAIHADQLTPTWRVYSTGSNVFQTRAGCLIGAEHVNNSYECDIPIGAGICASYQTQTNSPGSASSVASQSIIAYTMSLGAENSVAYSNNSIAIPTNFTISVTTEILPVSMTKTSVDCTMYICGDSTECSNLLLQYGSFCTQLNRALTGIAVEQDKNTQEVFAQVKQIYKTPPIKDFGGFNFSQILPDPSKPSKRSFIEDLLFNKVTLADAGFIKQYGDCLGDIAARDLICAQKFNGLTVLPPLLTDEMIAQYTSALLAGTITSGWTFGAGAALQIPFAMQMAYRFNGIGVTQNVLYENQKLIANQFNSAIGKIQDSLSSTASALGKLQDVVNQNAQALNTLVKQLSSNFGAISSVLNDILSRLDPPEAEVQIDRLITGRLQSLQTYVTQQLIRAAEIRASANLAATKMSECVLGQSKRVDFCGKGYHLMSFPQSAPHGVVFLHVTYVPAQEKNFTTAPAICHDGKAHFPREGVFVSNGTHWFVTQRNFYEPQIITTDNTFVSGNCDVVIGIVNNTVYDPLQSELDSIKEELDKIHKNGSGGSGDIIKLLNEQVNKEMQSSNLYMSMSSWCYTHSLDGAGLFLFDHAAEEYEHAKKLIIFLNENNVPVQLTSISAPEHKFEGLTQIFQKAYEHEQHISESINNIVDHAIKSKDHATFNFLQWYVAEQHEEEVLFKDILDKIELIGNENHGLYLADQYVKGIAKSRKSGS

SEQ ID NO: 307 - protein, 1704 aa, synthetic construct
NITNLCPFDAVFNATRFPSVYAWERVKISNCVADYTAFYNSTSFSTFKCYGVSPSKLIDLCFTSVYADTFLIRFSEVRQVAPGETGVIADYNYKLPDDFTGCVIAWNTAKQDVGSYFYRSHRSSKLKPFERDLSSDENGVRTLSTYDFNPNVPLDYQATRVVVLSFELLNAPATVCGPGSGGSGNITNLCPFDEVFNATRFASVYAWNRKRISNCVADYSVLYNFAPFFAFKCYGVSPTKLNDLCFTNVYADSFVIRGNEVSQIAPGQTGNIADYNYKLPDDFTGCVIAWNSNKLDSKVGGNYNYRYRLFRKSNLKPFERDISTEIYQAGNKPCNGVAGVNCYFPLQSYGFRPTYGVGHQPYRVVVLSFELLHAPATVCGPGSGGSGSSQCVNLTTRTQLPPAYTNSFTRGVYYPDKVFRSSVLHSTQDLFLPFFSNVTWFHAIHVSGTNGTKRFDNPVLPFNDGVYFASTEKSNIIRGWIFGTTLDSKTQSLLIVNNATNVVIKVCEFQFCNDPFLGVYYHKNNKSWMESEFRVYSSANNCTFEYVSQPFLMDLEGKQGNFKNLREFVFKNIDGYFKIYSKHTPINLVRDLPQGFSALEPLVDLPIGINITRFQTLLALHRSYLTPGDSSSGWTAGAAAYYVGYLQPRTFLLKYNENGTITDAVDCALDPLSETKCTLKSFTVEKGIYQTSNFRVQPTESIVRFPNITNLCPFGEVFNATKFPSVYAWERKKISNCVADYSVLYNSTFFSTFKCYGVSATKLNDLCFSNVYADSFVVKGDDVRQIAPGQTGVIADYNYKLPDDFMGCVLAWNTRNIDATSTGNYNYKYRYLRHGKLRPFERDISNVPFSPDGKPCTPPALNCYWPLNDYGFYTTTGIGYQPYRVVVLSFELLNAPATVCGPKKSTNLVKNKCVNFNFNGLTGTGVLTESNKKFLPFQQFGRDIADTTDAVRDPQTLEILDITPCSFGGVSVITPGTNTSNQVAVLYQDVNCTEVPVAIHADQLTPTWRVYSTGSNVFQTRAGCLIGAEHVNNSYECDIPIGAGICASYQTQTNSPGSASSVASQSIIAYTMSLGAENSVAYSNNSIAIPTNFTISVTTEILPVSMTKTSVDCTMYICGDSTECSNLLLQYGSFCTQLNRALTGIAVEQDKNTQEVFAQVKQIYKTPPIKDFGGFNFSQILPDPSKPSKRSFIEDLLFNKVTLADAGFIKQYGDCLGDIAARDLICAQKFNGLTVLPPLLTDEMIAQYTSALLAGTITSGWTFGAGAALQIPFAMQMAYRFNGIGVTQNVLYENQKLIANQFNSAIGKIQDSLSSTASALGKLQDVVNQNAQALNTLVKQLSSNFGAISSVLNDILSRLDPPEAEVQIDRLITGRLQSLQTYVTQQLIRAAEIRASANLAATKMSECVLGQSKRVDFCGKGYHLMSFPQSAPHGVVFLHVTYVPAQEKNFTTAPAICHDGKAHFPREGVFVSNGTHWFVTQRNFYEPQIITTDNTFVSGNCDVVIGIVNNTVYDPLQSELDSIKEELDKIHKNGSGGSGDIIKLLNEQVNKEMQSSNLYMSMSSWCYTHSLDGAGLFLFDHAAEEYEHAKKLIIFLNENNVPVQLTSISAPEHKFEGLTQIFQKAYEHEQHISESINNIVDHAIKSKDHATFNFLQWYVAEQHEEEVLFKDILDKIELIGNENHGLYLADQYVKGIAKSRKSGS

SEQ ID NO: 308 - protein, 1704 aa, synthetic construct
NITNRCPFDKVFNATRFPSVYAWERTKISDCVADYTVLYNSTSFSTFKCYGVSPSKLIDLCFTSVYADTFLIRSSEVRQVAPGETGVIADYNYKLPDDFTGCVIAWNTANQDQGQYYYRSSRKEKLKPFERDLSSDENGVYTLSTYDFYPSVPLDYQATRVVVLSFELLNAPATVCGPGSGGSGNITNLCPFDEVFNATRFASVYAWNRKRISNCVADYSVLYNFAPFFAFKCYGVSPTKLNDLCFTNVYADSFVIRGNEVSQIAPGQTGNIADYNYKLPDDFTGCVIAWNSNKLDSKVGGNYNYRYRLFRKSNLKPFERDISTEIYQAGNKPCNGVAGVNCYFPLQSYGFRPTYGVGHQPYRVVVLSFELLHAPATVCGPGSGGSGSSQCVNLTTRTQLPPAYTNSFTRGVYYPDKVFRSSVLHSTQDLFLPFFSNVTWFHAIHVSGTNGTKRFDNPVLPFNDGVYFASTEKSNIIRGWIFGTTLDSKTQSLLIVNNATNVVIKVCEFQFCNDPFLGVYYHKNNKSWMESEFRVYSSANNCTFEYVSQPFLMDLEGKQGNFKNLREFVFKNIDGYFKIYSKHTPINLVRDLPQGFSALEPLVDLPIGINITRFQTLLALHRSYLTPGDSSSGWTAGAAAYYVGYLQPRTFLLKYNENGTITDAVDCALDPLSETKCTLKSFTVEKGIYQTSNFRVQPTESIVRFPNITNLCPFGEVFNATKFPSVYAWERKKISNCVADYSVLYNSTFFSTFKCYGVSATKLNDLCFSNVYADSFVVKGDDVRQIAPGQTGVIADYNYKLPDDFMGCVLAWNTRNIDATSTGNYNYKYRYLRHGKLRPFERDISNVPFSPDGKPCTPPALNCYWPLNDYGFYTTTGIGYQPYRVVVLSFELLNAPATVCGPKKSTNLVKNKCVNFNFNGLTGTGVLTESNKKFLPFQQFGRDIADTTDAVRDPQTLEILDITPCSFGGVSVITPGTNTSNQVAVLYQDVNCTEVPVAIHADQLTPTWRVYSTGSNVFQTRAGCLIGAEHVNNSYECDIPIGAGICASYQTQTNSPGSASSVASQSIIAYTMSLGAENSVAYSNNSIAIPTNFTISVTTEILPVSMTKTSVDCTMYICGDSTECSNLLLQYGSFCTQLNRALTGIAVEQDKNTQEVFAQVKQIYKTPPIKDFGGFNFSQILPDPSKPSKRSFIEDLLFNKVTLADAGFIKQYGDCLGDIAARDLICAQKFNGLTVLPPLLTDEMIAQYTSALLAGTITSGWTFGAGAALQIPFAMQMAYRFNGIGVTQNVLYENQKLIANQFNSAIGKIQDSLSSTASALGKLQDVVNQNAQALNTLVKQLSSNFGAISSVLNDILSRLDPPEAEVQIDRLITGRLQSLQTYVTQQLIRAAEIRASANLAATKMSECVLGQSKRVDFCGKGYHLMSFPQSAPHGVVFLHVTYVPAQEKNFTTAPAICHDGKAHFPREGVFVSNGTHWFVTQRNFYEPQIITTDNTFVSGNCDVVIGIVNNTVYDPLQSELDSIKEELDKIHKNGSGGSGDIIKLLNEQVNKEMQSSNLYMSMSSWCYTHSLDGAGLFLFDHAAEEYEHAKKLIIFLNENNVPVQLTSISAPEHKFEGLTQIFQKAYEHEQHISESINNIVDHAIKSKDHATFNFLQWYVAEQHEEEVLFKDILDKIELIGNENHGLYLADQYVKGIAKSRKSGS

SEQ ID NO: 309 - protein, 1704 aa, synthetic construct
NITNLCPFDKVFNATRFPSVYAWERTKISDCVADYTVFYNSTSFSTFNCYGVSPSKLIDLCFTSVYADTFLIRFSEVRQVAPGQTGVIADYNYKLPDDFTGCVIAWNTAKQDVGSYFYRSHRSSKLKPFERDLSSEENGVRTLSTYDFNQYVPLEYQATRVVVLSFELLNAPATVCGPGSGGSGNITNLCPFDEVFNATRFASVYAWNRKRISNCVADYSVLYNFAPFFAFKCYGVSPTKLNDLCFTNVYADSFVIRGNEVSQIAPGQTGNIADYNYKLPDDFTGCVIAWNSNKLDSKVGGNYNYRYRLFRKSNLKPFERDISTEIYQAGNKPCNGVAGVNCYFPLQSYGFRPTYGVGHQPYRVVVLSFELLHAPATVCGPGSGGSGSSQCVNLTTRTQLPPAYTNSFTRGVYYPDKVFRSSVLHSTQDLFLPFFSNVTWFHAIHVSGTNGTKRFDNPVLPFNDGVYFASTEKSNIIRGWIFGTTLDSKTQSLLIVNNATNVVIKVCEFQFCNDPFLGVYYHKNNKSWMESEFRVYSSANNCTFEYVSQPFLMDLEGKQGNFKNLREFVFKNIDGYFKIYSKHTPINLVRDLPQGFSALEPLVDLPIGINITRFQTLLALHRSYLTPGDSSSGWTAGAAAYYVGYLQPRTFLLKYNENGTITDAVDCALDPLSETKCTLKSFTVEKGIYQTSNFRVQPTESIVRFPNITNLCPFGEVFNATKFPSVYAWERKKISNCVADYSVLYNSTFFSTFKCYGVSATKLNDLCFSNVYADSFVVKGDDVRQIAPGQTGVIADYNYKLPDDFMGCVLAWNTRNIDATSTGNYNYKYRYLRHGKLRPFERDISNVPFSPDGKPCTPPALNCYWPLNDYGFYTTTGIGYQPYRVVVLSFELLNAPATVCGPKKSTNLVKNKCVNFNFNGLTGTGVLTESNKKFLPFQQFGRDIADTTDAVRDPQTLEILDITPCSFGGVSVITPGTNTSNQVAVLYQDVNCTEVPVAIHADQLTPTWRVYSTGSNVFQTRAGCLIGAEHVNNSYECDIPIGAGICASYQTQTNSPGSASSVASQSIIAYTMSLGAENSVAYSNNSIAIPTNFTISVTTEILPVSMTKTSVDCTMYICGDSTECSNLLLQYGSFCTQLNRALTGIAVEQDKNTQEVFAQVKQIYKTPPIKDFGGFNFSQILPDPSKPSKRSFIEDLLFNKVTLADAGFIKQYGDCLGDIAARDLICAQKFNGLTVLPPLLTDEMIAQYTSALLAGTITSGWTFGAGAALQIPFAMQMAYRFNGIGVTQNVLYENQKLIANQFNSAIGKIQDSLSSTASALGKLQDVVNQNAQALNTLVKQLSSNFGAISSVLNDILSRLDPPEAEVQIDRLITGRLQSLQTYVTQQLIRAAEIRASANLAATKMSECVLGQSKRVDFCGKGYHLMSFPQSAPHGVVFLHVTYVPAQEKNFTTAPAICHDGKAHFPREGVFVSNGTHWFVTQRNFYEPQIITTDNTFVSGNCDVVIGIVNNTVYDPLQSELDSIKEELDKIHKNGSGGSGDIIKLLNEQVNKEMQSSNLYMSMSSWCYTHSLDGAGLFLFDHAAEEYEHAKKLIIFLNENNVPVQLTSISAPEHKFEGLTQIFQKAYEHEQHISESINNIVDHAIKSKDHATFNFLQWYVAEQHEEEVLFKDILDKIELIGNENHGLYLADQYVKGIAKSRKSGS

SEQ ID NO: 310 - protein, 1704 aa, synthetic construct
NITNRCPFDKVFNATRFPNVYAWERTKISDCVADYTVLYNSTSFSTFKCYGVSPSKLIDLCFTSVYADTFLIRSSEVRQVAPGETGVIADYNYKLPDDFTGCVIAWNTAKQDQGQYYYRSHRKTKLKPFERDLSSDENGVRTLSTYDFYPSVPVAYQATRVVVLSFELLNAPATVCGPGSGGSGNITNLCPFDEVFNATRFASVYAWNRKRISNCVADYSVLYNFAPFFAFKCYGVSPTKLNDLCFTNVYADSFVIRGNEVSQIAPGQTGNIADYNYKLPDDFTGCVIAWNSNKLDSKVGGNYNYRYRLFRKSNLKPFERDISTEIYQAGNKPCNGVAGVNCYFPLQSYGFRPTYGVGHQPYRVVVLSFELLHAPATVCGPGSGGSGSSQCVNLTTRTQLPPAYTNSFTRGVYYPDKVFRSSVLHSTQDLFLPFFSNVTWFHAIHVSGTNGTKRFDNPVLPFNDGVYFASTEKSNIIRGWIFGTTLDSKTQSLLIVNNATNVVIKVCEFQFCNDPFLGVYYHKNNKSWMESEFRVYSSANNCTFEYVSQPFLMDLEGKQGNFKNLREFVFKNIDGYFKIYSKHTPINLVRDLPQGFSALEPLVDLPIGINITRFQTLLALHRSYLTPGDSSSGWTAGAAAYYVGYLQPRTFLLKYNENGTITDAVDCALDPLSETKCTLKSFTVEKGIYQTSNFRVQPTESIVRFPNITNLCPFGEVFNATKFPSVYAWERKKISNCVADYSVLYNSTFFSTFKCYGVSATKLNDLCFSNVYADSFVVKGDDVRQIAPGQTGVIADYNYKLPDDFMGCVLAWNTRNIDATSTGNYNYKYRYLRHGKLRPFERDISNVPFSPDGKPCTPPALNCYWPLNDYGFYTTTGIGYQPYRVVVLSFELLNAPATVCGPKKSTNLVKNKCVNFNFNGLTGTGVLTESNKKFLPFQQFGRDIADTTDAVRDPQTLEILDITPCSFGGVSVITPGTNTSNQVAVLYQDVNCTEVPVAIHADQLTPTWRVYSTGSNVFQTRAGCLIGAEHVNNSYECDIPIGAGICASYQTQTNSPGSASSVASQSIIAYTMSLGAENSVAYSNNSIAIPTNFTISVTTEILPVSMTKTSVDCTMYICGDSTECSNLLLQYGSFCTQLNRALTGIAVEQDKNTQEVFAQVKQIYKTPPIKDFGGFNFSQILPDPSKPSKRSFIEDLLFNKVTLADAGFIKQYGDCLGDIAARDLICAQKFNGLTVLPPLLTDEMIAQYTSALLAGTITSGWTFGAGAALQIPFAMQMAYRFNGIGVTQNVLYENQKLIANQFNSAIGKIQDSLSSTASALGKLQDVVNQNAQALNTLVKQLSSNFGAISSVLNDILSRLDPPEAEVQIDRLITGRLQSLQTYVTQQLIRAAEIRASANLAATKMSECVLGQSKRVDFCGKGYHLMSFPQSAPHGVVFLHVTYVPAQEKNFTTAPAICHDGKAHFPREGVFVSNGTHWFVTQRNFYEPQIITTDNTFVSGNCDVVIGIVNNTVYDPLQSELDSIKEELDKIHKNGSGGSGDIIKLLNEQVNKEMQSSNLYMSMSSWCYTHSLDGAGLFLFDHAAEEYEHAKKLIIFLNENNVPVQLTSISAPEHKFEGLTQIFQKAYEHEQHISESINNIVDHAIKSKDHATFNFLQWYVAEQHEEEVLFKDILDKIELIGNENHGLYLADQYVKGIAKSRKSGS

SEQ ID NO: 311 - protein, 1704 aa, synthetic construct
NITNRCPFDKVFNASRFPNVYAWERTKISDCVADYTVLYNSTSFSTFKCYGVSPSKLIDLCFTSVYADTFLIRSSEVRQVAPGETGVIADYNYKLPDDFTGCVIAWNTAKQDQGQYYYRSSRKTKLKPFERDLTSDENGVRTLSTYDFYPNVPIEYQATRVVVLSFELLNAPATVCGPGSGGSGNITNLCPFDEVFNATRFASVYAWNRKRISNCVADYSVLYNFAPFFAFKCYGVSPTKLNDLCFTNVYADSFVIRGNEVSQIAPGQTGNIADYNYKLPDDFTGCVIAWNSNKLDSKVGGNYNYRYRLFRKSNLKPFERDISTEIYQAGNKPCNGVAGVNCYFPLQSYGFRPTYGVGHQPYRVVVLSFELLHAPATVCGPGSGGSGSSQCVNLTTRTQLPPAYTNSFTRGVYYPDKVFRSSVLHSTQDLFLPFFSNVTWFHAIHVSGTNGTKRFDNPVLPFNDGVYFASTEKSNIIRGWIFGTTLDSKTQSLLIVNNATNVVIKVCEFQFCNDPFLGVYYHKNNKSWMESEFRVYSSANNCTFEYVSQPFLMDLEGKQGNFKNLREFVFKNIDGYFKIYSKHTPINLVRDLPQGFSALEPLVDLPIGINITRFQTLLALHRSYLTPGDSSSGWTAGAAAYYVGYLQPRTFLLKYNENGTITDAVDCALDPLSETKCTLKSFTVEKGIYQTSNFRVQPTESIVRFPNITNLCPFGEVFNATKFPSVYAWERKKISNCVADYSVLYNSTFFSTFKCYGVSATKLNDLCFSNVYADSFVVKGDDVRQIAPGQTGVIADYNYKLPDDFMGCVLAWNTRNIDATSTGNYNYKYRYLRHGKLRPFERDISNVPFSPDGKPCTPPALNCYWPLNDYGFYTTTGIGYQPYRVVVLSFELLNAPATVCGPKKSTNLVKNKCVNFNFNGLTGTGVLTESNKKFLPFQQFGRDIADTTDAVRDPQTLEILDITPCSFGGVSVITPGTNTSNQVAVLYQDVNCTEVPVAIHADQLTPTWRVYSTGSNVFQTRAGCLIGAEHVNNSYECDIPIGAGICASYQTQTNSPGSASSVASQSIIAYTMSLGAENSVAYSNNSIAIPTNFTISVTTEILPVSMTKTSVDCTMYICGDSTECSNLLLQYGSFCTQLNRALTGIAVEQDKNTQEVFAQVKQIYKTPPIKDFGGFNFSQILPDPSKPSKRSFIEDLLFNKVTLADAGFIKQYGDCLGDIAARDLICAQKFNGLTVLPPLLTDEMIAQYTSALLAGTITSGWTFGAGAALQIPFAMQMAYRFNGIGVTQNVLYENQKLIANQFNSAIGKIQDSLSSTASALGKLQDVVNQNAQALNTLVKQLSSNFGAISSVLNDILSRLDPPEAEVQIDRLITGRLQSLQTYVTQQLIRAAEIRASANLAATKMSECVLGQSKRVDFCGKGYHLMSFPQSAPHGVVFLHVTYVPAQEKNFTTAPAICHDGKAHFPREGVFVSNGTHWFVTQRNFYEPQIITTDNTFVSGNCDVVIGIVNNTVYDPLQSELDSIKEELDKIHKNGSGGSGDIIKLLNEQVNKEMQSSNLYMSMSSWCYTHSLDGAGLFLFDHAAEEYEHAKKLIIFLNENNVPVQLTSISAPEHKFEGLTQIFQKAYEHEQHISESINNIVDHAIKSKDHATFNFLQWYVAEQHEEEVLFKDILDKIELIGNENHGLYLADQYVKGIAKSRKSGS

SEQ ID NO: 312 - protein, 1719 aa, synthetic construct
NITNLCPFSQVFNATRFPSVYAWTRERISNCIADYSVLYNSTSFSTFRCYGVSPTKLNDLCFSNVYADSMVVRGDEVRQIAPSQTGVIADYNYKLPDDFTGCVIAWNSKAKDENGQYFYRLFRKSKLLPFQRDVSNVTYGSGKNDGCNPSEADCYWPLLKYGFTSSVSQDYQPYRVVVLSFELLNAPATVCGPGSGGSGNITNLCPFDEVFNATRFASVYAWNRKRISNCVADYSVLYNFAPFFAFKCYGVSPTKLNDLCFTNVYADSFVIRGNEVSQIAPGQTGNIADYNYKLPDDFTGCVIAWNSNKLDSKVGGNYNYRYRLFRKSNLKPFERDISTEIYQAGNKPCNGVAGVNCYFPLQSYGFRPTYGVGHQPYRVVVLSFELLHAPATVCGPGSGGSGSSQCVNLTTRTQLPPAYTNSFTRGVYYPDKVFRSSVLHSTQDLFLPFFSNVTWFHAIHVSGTNGTKRFDNPVLPFNDGVYFASTEKSNIIRGWIFGTTLDSKTQSLLIVNNATNVVIKVCEFQFCNDPFLGVYYHKNNKSWMESEFRVYSSANNCTFEYVSQPFLMDLEGKQGNFKNLREFVFKNIDGYFKIYSKHTPINLVRDLPQGFSALEPLVDLPIGINITRFQTLLALHRSYLTPGDSSSGWTAGAAAYYVGYLQPRTFLLKYNENGTITDAVDCALDPLSETKCTLKSFTVEKGIYQTSNFRVQPTESIVRFPNITNLCPFGEVFNATKFPSVYAWERKKISNCVADYSVLYNSTFFSTFKCYGVSATKLNDLCFSNVYADSFVVKGDDVRQIAPGQTGVIADYNYKLPDDFMGCVLAWNTRNIDATSTGNYNYKYRYLRHGKLRPFERDISNVPFSPDGKPCTPPALNCYWPLNDYGFYTTTGIGYQPYRVVVLSFELLNAPATVCGPKKSTNLVKNKCVNFNFNGLTGTGVLTESNKKFLPFQQFGRDIADTTDAVRDPQTLEILDITPCSFGGVSVITPGTNTSNQVAVLYQDVNCTEVPVAIHADQLTPTWRVYSTGSNVFQTRAGCLIGAEHVNNSYECDIPIGAGICASYQTQTNSPGSASSVASQSIIAYTMSLGAENSVAYSNNSIAIPTNFTISVTTEILPVSMTKTSVDCTMYICGDSTECSNLLLQYGSFCTQLNRALTGIAVEQDKNTQEVFAQVKQIYKTPPIKDFGGFNFSQILPDPSKPSKRSFIEDLLFNKVTLADAGFIKQYGDCLGDIAARDLICAQKFNGLTVLPPLLTDEMIAQYTSALLAGTITSGWTFGAGAALQIPFAMQMAYRFNGIGVTQNVLYENQKLIANQFNSAIGKIQDSLSSTASALGKLQDVVNQNAQALNTLVKQLSSNFGAISSVLNDILSRLDPPEAEVQIDRLITGRLQSLQTYVTQQLIRAAEIRASANLAATKMSECVLGQSKRVDFCGKGYHLMSFPQSAPHGVVFLHVTYVPAQEKNFTTAPAICHDGKAHFPREGVFVSNGTHWFVTQRNFYEPQIITTDNTFVSGNCDVVIGIVNNTVYDPLQSELDSIKEELDKIHKNGSGGSGDIIKLLNEQVNKEMQSSNLYMSMSSWCYTHSLDGAGLFLFDHAAEEYEHAKKLIIFLNENNVPVQLTSISAPEHKFEGLTQIFQKAYEHEQHISESINNIVDHAIKSKDHATFNFLQWYVAEQHEEEVLFKDILDKIELIGNENHGLYLADQYVKGIAKSRKSGS

SEQ ID NO: 313 - protein, 1719 aa, synthetic construct
NITNLCPFSQVFNATRFPSVYAWTRERISNCIADYSVLYNSTSFSTFRCYGVSPTKLNDLCFSNVYADSMVVRGDEVRQIAPSQTGVIADYNYKLPDDFTGCVIAWNSKAKDENGQYFYRLFRKSKLLPFQRDVSNVTYGSGKNDGCNPSEADCYWPLLKYGFWSSVSQDYQPYRVVVLSFELLNAPATVCGPGSGGSGNITNLCPFDEVFNATRFASVYAWNRKRISNCVADYSVLYNFAPFFAFKCYGVSPTKLNDLCFTNVYADSFVIRGNEVSQIAPGQTGNIADYNYKLPDDFTGCVIAWNSNKLDSKVGGNYNYRYRLFRKSNLKPFERDISTEIYQAGNKPCNGVAGVNCYFPLQSYGFRPTYGVGHQPYRVVVLSFELLHAPATVCGPGSGGSGSSQCVNLTTRTQLPPAYTNSFTRGVYYPDKVFRSSVLHSTQDLFLPFFSNVTWFHAIHVSGTNGTKRFDNPVLPFNDGVYFASTEKSNIIRGWIFGTTLDSKTQSLLIVNNATNVVIKVCEFQFCNDPFLGVYYHKNNKSWMESEFRVYSSANNCTFEYVSQPFLMDLEGKQGNFKNLREFVFKNIDGYFKIYSKHTPINLVRDLPQGFSALEPLVDLPIGINITRFQTLLALHRSYLTPGDSSSGWTAGAAAYYVGYLQPRTFLLKYNENGTITDAVDCALDPLSETKCTLKSFTVEKGIYQTSNFRVQPTESIVRFPNITNLCPFGEVFNATKFPSVYAWERKKISNCVADYSVLYNSTFFSTFKCYGVSATKLNDLCFSNVYADSFVVKGDDVRQIAPGQTGVIADYNYKLPDDFMGCVLAWNTRNIDATSTGNYNYKYRYLRHGKLRPFERDISNVPFSPDGKPCTPPALNCYWPLNDYGFYTTTGIGYQPYRVVVLSFELLNAPATVCGPKKSTNLVKNKCVNFNFNGLTGTGVLTESNKKFLPFQQFGRDIADTTDAVRDPQTLEILDITPCSFGGVSVITPGTNTSNQVAVLYQDVNCTEVPVAIHADQLTPTWRVYSTGSNVFQTRAGCLIGAEHVNNSYECDIPIGAGICASYQTQTNSPGSASSVASQSIIAYTMSLGAENSVAYSNNSIAIPTNFTISVTTEILPVSMTKTSVDCTMYICGDSTECSNLLLQYGSFCTQLNRALTGIAVEQDKNTQEVFAQVKQIYKTPPIKDFGGFNFSQILPDPSKPSKRSFIEDLLFNKVTLADAGFIKQYGDCLGDIAARDLICAQKFNGLTVLPPLLTDEMIAQYTSALLAGTITSGWTFGAGAALQIPFAMQMAYRFNGIGVTQNVLYENQKLIANQFNSAIGKIQDSLSSTASALGKLQDVVNQNAQALNTLVKQLSSNFGAISSVLNDILSRLDPPEAEVQIDRLITGRLQSLQTYVTQQLIRAAEIRASANLAATKMSECVLGQSKRVDFCGKGYHLMSFPQSAPHGVVFLHVTYVPAQEKNFTTAPAICHDGKAHFPREGVFVSNGTHWFVTQRNFYEPQIITTDNTFVSGNCDVVIGIVNNTVYDPLQSELDSIKEELDKIHKNGSGGSGDIIKLLNEQVNKEMQSSNLYMSMSSWCYTHSLDGAGLFLFDHAAEEYEHAKKLIIFLNENNVPVQLTSISAPEHKFEGLTQIFQKAYEHEQHISESINNIVDHAIKSKDHATFNFLQWYVAEQHEEEVLFKDILDKIELIGNENHGLYLADQYVKGIAKSRKSGS

SEQ ID NO: 314 - protein, 1719 aa, synthetic construct
NITNLCPFSQVFNATRFPSVYAWTRERISNCIADYSVLYNSTSFSTFRCYGVSPTKLNDLCFSNVYADSMVVRGDEVRQIAPSQTGVIADYNYKLPDDFTGCVIAWNSKAKDENGQYFYRLFRKSKLLPFQRDVSNVTYGSGKNDGCNPSEADCYWPLYKYGFWSSVSQDYQPYRVVVLSFELLNAPATVCGPGSGGSGNITNLCPFDEVFNATRFASVYAWNRKRISNCVADYSVLYNFAPFFAFKCYGVSPTKLNDLCFTNVYADSFVIRGNEVSQIAPGQTGNIADYNYKLPDDFTGCVIAWNSNKLDSKVGGNYNYRYRLFRKSNLKPFERDISTEIYQAGNKPCNGVAGVNCYFPLQSYGFRPTYGVGHQPYRVVVLSFELLHAPATVCGPGSGGSGSSQCVNLTTRTQLPPAYTNSFTRGVYYPDKVFRSSVLHSTQDLFLPFFSNVTWFHAIHVSGTNGTKRFDNPVLPFNDGVYFASTEKSNIIRGWIFGTTLDSKTQSLLIVNNATNVVIKVCEFQFCNDPFLGVYYHKNNKSWMESEFRVYSSANNCTFEYVSQPFLMDLEGKQGNFKNLREFVFKNIDGYFKIYSKHTPINLVRDLPQGFSALEPLVDLPIGINITRFQTLLALHRSYLTPGDSSSGWTAGAAAYYVGYLQPRTFLLKYNENGTITDAVDCALDPLSETKCTLKSFTVEKGIYQTSNFRVQPTESIVRFPNITNLCPFGEVFNATKFPSVYAWERKKISNCVADYSVLYNSTFFSTFKCYGVSATKLNDLCFSNVYADSFVVKGDDVRQIAPGQTGVIADYNYKLPDDFMGCVLAWNTRNIDATSTGNYNYKYRYLRHGKLRPFERDISNVPFSPDGKPCTPPALNCYWPLNDYGFYTTTGIGYQPYRVVVLSFELLNAPATVCGPKKSTNLVKNKCVNFNFNGLTGTGVLTESNKKFLPFQQFGRDIADTTDAVRDPQTLEILDITPCSFGGVSVITPGTNTSNQVAVLYQDVNCTEVPVAIHADQLTPTWRVYSTGSNVFQTRAGCLIGAEHVNNSYECDIPIGAGICASYQTQTNSPGSASSVASQSIIAYTMSLGAENSVAYSNNSIAIPTNFTISVTTEILPVSMTKTSVDCTMYICGDSTECSNLLLQYGSFCTQLNRALTGIAVEQDKNTQEVFAQVKQIYKTPPIKDFGGFNFSQILPDPSKPSKRSFIEDLLFNKVTLADAGFIKQYGDCLGDIAARDLICAQKFNGLTVLPPLLTDEMIAQYTSALLAGTITSGWTFGAGAALQIPFAMQMAYRFNGIGVTQNVLYENQKLIANQFNSAIGKIQDSLSSTASALGKLQDVVNQNAQALNTLVKQLSSNFGAISSVLNDILSRLDPPEAEVQIDRLITGRLQSLQTYVTQQLIRAAEIRASANLAATKMSECVLGQSKRVDFCGKGYHLMSFPQSAPHGVVFLHVTYVPAQEKNFTTAPAICHDGKAHFPREGVFVSNGTHWFVTQRNFYEPQIITTDNTFVSGNCDVVIGIVNNTVYDPLQSELDSIKEELDKIHKNGSGGSGDIIKLLNEQVNKEMQSSNLYMSMSSWCYTHSLDGAGLFLFDHAAEEYEHAKKLIIFLNENNVPVQLTSISAPEHKFEGLTQIFQKAYEHEQHISESINNIVDHAIKSKDHATFNFLQWYVAEQHEEEVLFKDILDKIELIGNENHGLYLADQYVKGIAKSRKSGS

SEQ ID NO: 315 - protein, 1720 aa, synthetic construct
NMTNICPFDQVFNKTQFPSVYAWERVRISDCVSDYTVLYNSSASFSTFKCYGVSPTKLNDLCFSGVYADYFVVKGDHVHQIAPGQTGVIADYNYKLPSEFVGCILAWNTRTIDSKRGFYYRLFRHGNIRPYERDTSNVPYNAAGGTCNQPGTHNCYEPLQDYGFTSTSGVGYQPFRVVVLSFELLNAPATVCGPGSGGSGNITNLCPFDEVFNATRFASVYAWNRKRISNCVADYSVLYNFAPFFAFKCYGVSPTKLNDLCFTNVYADSFVIRGNEVSQIAPGQTGNIADYNYKLPDDFTGCVIAWNSNKLDSKVGGNYNYRYRLFRKSNLKPFERDISTEIYQAGNKPCNGVAGVNCYFPLQSYGFRPTYGVGHQPYRVVVLSFELLHAPATVCGPGSGGSGSSQCVNLTTRTQLPPAYTNSFTRGVYYPDKVFRSSVLHSTQDLFLPFFSNVTWFHAIHVSGTNGTKRFDNPVLPFNDGVYFASTEKSNIIRGWIFGTTLDSKTQSLLIVNNATNVVIKVCEFQFCNDPFLGVYYHKNNKSWMESEFRVYSSANNCTFEYVSQPFLMDLEGKQGNFKNLREFVFKNIDGYFKIYSKHTPINLVRDLPQGFSALEPLVDLPIGINITRFQTLLALHRSYLTPGDSSSGWTAGAAAYYVGYLQPRTFLLKYNENGTITDAVDCALDPLSETKCTLKSFTVEKGIYQTSNFRVQPTESIVRFPNITNLCPFGEVFNATKFPSVYAWERKKISNCVADYSVLYNSTFFSTFKCYGVSATKLNDLCFSNVYADSFVVKGDDVRQIAPGQTGVIADYNYKLPDDFMGCVLAWNTRNIDATSTGNYNYKYRYLRHGKLRPFERDISNVPFSPDGKPCTPPALNCYWPLNDYGFYTTTGIGYQPYRVVVLSFELLNAPATVCGPKKSTNLVKNKCVNFNFNGLTGTGVLTESNKKFLPFQQFGRDIADTTDAVRDPQTLEILDITPCSFGGVSVITPGTNTSNQVAVLYQDVNCTEVPVAIHADQLTPTWRVYSTGSNVFQTRAGCLIGAEHVNNSYECDIPIGAGICASYQTQTNSPGSASSVASQSIIAYTMSLGAENSVAYSNNSIAIPTNFTISVTTEILPVSMTKTSVDCTMYICGDSTECSNLLLQYGSFCTQLNRALTGIAVEQDKNTQEVFAQVKQIYKTPPIKDFGGFNFSQILPDPSKPSKRSFIEDLLFNKVTLADAGFIKQYGDCLGDIAARDLICAQKFNGLTVLPPLLTDEMIAQYTSALLAGTITSGWTFGAGAALQIPFAMQMAYRFNGIGVTQNVLYENQKLIANQFNSAIGKIQDSLSSTASALGKLQDVVNQNAQALNTLVKQLSSNFGAISSVLNDILSRLDPPEAEVQIDRLITGRLQSLQTYVTQQLIRAAEIRASANLAATKMSECVLGQSKRVDFCGKGYHLMSFPQSAPHGVVFLHVTYVPAQEKNFTTAPAICHDGKAHFPREGVFVSNGTHWFVTQRNFYEPQIITTDNTFVSGNCDVVIGIVNNTVYDPLQSELDSIKEELDKIHKNGSGGSGDIIKLLNEQVNKEMQSSNLYMSMSSWCYTHSLDGAGLFLFDHAAEEYEHAKKLIIFLNENNVPVQLTSISAPEHKFEGLTQIFQKAYEHEQHISESINNIVDHAIKSKDHATFNFLQWYVAEQHEEEVLFKDILDKIELIGNENHGLYLADQYVKGIAKSRKSGS

SEQ ID NO: 316 - protein, 1720 aa, synthetic construct
NMTNICPFDQVFNKTQFPSVYAWERVRISDCVSDYTVLYNSSASFSTFKCYGVSPTKLNDLCFSGVYADYFVVKGDHVHQIAPGQTGVIADYNYKLPSEFVGCILAWNTRTIDSKRGFYYRLFRHGNIRPYERDTSNVPYNAAGGTCNQPGTHNCYEPLQDYGFWSTSGVGYQPFRVVVLSFELLNAPATVCGPGSGGSGNITNLCPFDEVFNATRFASVYAWNRKRISNCVADYSVLYNFAPFFAFKCYGVSPTKLNDLCFTNVYADSFVIRGNEVSQIAPGQTGNIADYNYKLPDDFTGCVIAWNSNKLDSKVGGNYNYRYRLFRKSNLKPFERDISTEIYQAGNKPCNGVAGVNCYFPLQSYGFRPTYGVGHQPYRVVVLSFELLHAPATVCGPGSGGSGSSQCVNLTTRTQLPPAYTNSFTRGVYYPDKVFRSSVLHSTQDLFLPFFSNVTWFHAIHVSGTNGTKRFDNPVLPFNDGVYFASTEKSNIIRGWIFGTTLDSKTQSLLIVNNATNVVIKVCEFQFCNDPFLGVYYHKNNKSWMESEFRVYSSANNCTFEYVSQPFLMDLEGKQGNFKNLREFVFKNIDGYFKIYSKHTPINLVRDLPQGFSALEPLVDLPIGINITRFQTLLALHRSYLTPGDSSSGWTAGAAAYYVGYLQPRTFLLKYNENGTITDAVDCALDPLSETKCTLKSFTVEKGIYQTSNFRVQPTESIVRFPNITNLCPFGEVFNATKFPSVYAWERKKISNCVADYSVLYNSTFFSTFKCYGVSATKLNDLCFSNVYADSFVVKGDDVRQIAPGQTGVIADYNYKLPDDFMGCVLAWNTRNIDATSTGNYNYKYRYLRHGKLRPFERDISNVPFSPDGKPCTPPALNCYWPLNDYGFYTTTGIGYQPYRVVVLSFELLNAPATVCGPKKSTNLVKNKCVNFNFNGLTGTGVLTESNKKFLPFQQFGRDIADTTDAVRDPQTLEILDITPCSFGGVSVITPGTNTSNQVAVLYQDVNCTEVPVAIHADQLTPTWRVYSTGSNVFQTRAGCLIGAEHVNNSYECDIPIGAGICASYQTQTNSPGSASSVASQSIIAYTMSLGAENSVAYSNNSIAIPTNFTISVTTEILPVSMTKTSVDCTMYICGDSTECSNLLLQYGSFCTQLNRALTGIAVEQDKNTQEVFAQVKQIYKTPPIKDFGGFNFSQILPDPSKPSKRSFIEDLLFNKVTLADAGFIKQYGDCLGDIAARDLICAQKFNGLTVLPPLLTDEMIAQYTSALLAGTITSGWTFGAGAALQIPFAMQMAYRFNGIGVTQNVLYENQKLIANQFNSAIGKIQDSLSSTASALGKLQDVVNQNAQALNTLVKQLSSNFGAISSVLNDILSRLDPPEAEVQIDRLITGRLQSLQTYVTQQLIRAAEIRASANLAATKMSECVLGQSKRVDFCGKGYHLMSFPQSAPHGVVFLHVTYVPAQEKNFTTAPAICHDGKAHFPREGVFVSNGTHWFVTQRNFYEPQIITTDNTFVSGNCDVVIGIVNNTVYDPLQSELDSIKEELDKIHKNGSGGSGDIIKLLNEQVNKEMQSSNLYMSMSSWCYTHSLDGAGLFLFDHAAEEYEHAKKLIIFLNENNVPVQLTSISAPEHKFEGLTQIFQKAYEHEQHISESINNIVDHAIKSKDHATFNFLQWYVAEQHEEEVLFKDILDKIELIGNENHGLYLADQYVKGIAKSRKSGS

SEQ ID NO: 317 - protein, 1720 aa, synthetic construct
NMTNICPFDQVFNKTQFPSVYAWERVRISDCVSDYTVLYNSSASFSTFKCYGVSPTKLNDLCFSGVYADYFVVKGDHVHQIAPGQTGVIADYNYKLPSEFVGCILAWNTRTIDSKRGFYYRLFRHGNIRPYERDTSNVPYNAAGGTCNQPGTHNCYEPLYDYGFWSTSGVGYQPFRVVVLSFELLNAPATVCGPGSGGSGNITNLCPFDEVFNATRFASVYAWNRKRISNCVADYSVLYNFAPFFAFKCYGVSPTKLNDLCFTNVYADSFVIRGNEVSQIAPGQTGNIADYNYKLPDDFTGCVIAWNSNKLDSKVGGNYNYRYRLFRKSNLKPFERDISTEIYQAGNKPCNGVAGVNCYFPLQSYGFRPTYGVGHQPYRVVVLSFELLHAPATVCGPGSGGSGSSQCVNLTTRTQLPPAYTNSFTRGVYYPDKVFRSSVLHSTQDLFLPFFSNVTWFHAIHVSGTNGTKRFDNPVLPFNDGVYFASTEKSNIIRGWIFGTTLDSKTQSLLIVNNATNVVIKVCEFQFCNDPFLGVYYHKNNKSWMESEFRVYSSANNCTFEYVSQPFLMDLEGKQGNFKNLREFVFKNIDGYFKIYSKHTPINLVRDLPQGFSALEPLVDLPIGINITRFQTLLALHRSYLTPGDSSSGWTAGAAAYYVGYLQPRTFLLKYNENGTITDAVDCALDPLSETKCTLKSFTVEKGIYQTSNFRVQPTESIVRFPNITNLCPFGEVFNATKFPSVYAWERKKISNCVADYSVLYNSTFFSTFKCYGVSATKLNDLCFSNVYADSFVVKGDDVRQIAPGQTGVIADYNYKLPDDFMGCVLAWNTRNIDATSTGNYNYKYRYLRHGKLRPFERDISNVPFSPDGKPCTPPALNCYWPLNDYGFYTTTGIGYQPYRVVVLSFELLNAPATVCGPKKSTNLVKNKCVNFNFNGLTGTGVLTESNKKFLPFQQFGRDIADTTDAVRDPQTLEILDITPCSFGGVSVITPGTNTSNQVAVLYQDVNCTEVPVAIHADQLTPTWRVYSTGSNVFQTRAGCLIGAEHVNNSYECDIPIGAGICASYQTQTNSPGSASSVASQSIIAYTMSLGAENSVAYSNNSIAIPTNFTISVTTEILPVSMTKTSVDCTMYICGDSTECSNLLLQYGSFCTQLNRALTGIAVEQDKNTQEVFAQVKQIYKTPPIKDFGGFNFSQILPDPSKPSKRSFIEDLLFNKVTLADAGFIKQYGDCLGDIAARDLICAQKFNGLTVLPPLLTDEMIAQYTSALLAGTITSGWTFGAGAALQIPFAMQMAYRFNGIGVTQNVLYENQKLIANQFNSAIGKIQDSLSSTASALGKLQDVVNQNAQALNTLVKQLSSNFGAISSVLNDILSRLDPPEAEVQIDRLITGRLQSLQTYVTQQLIRAAEIRASANLAATKMSECVLGQSKRVDFCGKGYHLMSFPQSAPHGVVFLHVTYVPAQEKNFTTAPAICHDGKAHFPREGVFVSNGTHWFVTQRNFYEPQIITTDNTFVSGNCDVVIGIVNNTVYDPLQSELDSIKEELDKIHKNGSGGSGDIIKLLNEQVNKEMQSSNLYMSMSSWCYTHSLDGAGLFLFDHAAEEYEHAKKLIIFLNENNVPVQLTSISAPEHKFEGLTQIFQKAYEHEQHISESINNIVDHAIKSKDHATFNFLQWYVAEQHEEEVLFKDILDKIELIGNENHGLYLADQYVKGIAKSRKSGS

SEQ ID NO: 318 - protein, 1722 aa, synthetic construct
NITNLCPFGQVFNASNFPSVYAWERLRISDCVADYAVLYNSSSSFSTFKCYGVSPTKLNDLCFSSVYADYFVVKGDDVRQIAPAQTGVIADYNYKLPDDFTGCVLAWNTNSVDSKSGNNFYYRLFRHGKIKPYERDISNVLYNSAGGTCSSISQLGCYEPLKSYGFTPTVGVGYQPYRVVVLSFELLNAPATVCGPGSGGSGNITNLCPFDEVFNATRFASVYAWNRKRISNCVADYSVLYNFAPFFAFKCYGVSPTKLNDLCFTNVYADSFVIRGNEVSQIAPGQTGNIADYNYKLPDDFTGCVIAWNSNKLDSKVGGNYNYRYRLFRKSNLKPFERDISTEIYQAGNKPCNGVAGVNCYFPLQSYGFRPTYGVGHQPYRVVVLSFELLHAPATVCGPGSGGSGSSQCVNLTTRTQLPPAYTNSFTRGVYYPDKVFRSSVLHSTQDLFLPFFSNVTWFHAIHVSGTNGTKRFDNPVLPFNDGVYFASTEKSNIIRGWIFGTTLDSKTQSLLIVNNATNVVIKVCEFQFCNDPFLGVYYHKNNKSWMESEFRVYSSANNCTFEYVSQPFLMDLEGKQGNFKNLREFVFKNIDGYFKIYSKHTPINLVRDLPQGFSALEPLVDLPIGINITRFQTLLALHRSYLTPGDSSSGWTAGAAAYYVGYLQPRTFLLKYNENGTITDAVDCALDPLSETKCTLKSFTVEKGIYQTSNFRVQPTESIVRFPNITNLCPFGEVFNATKFPSVYAWERKKISNCVADYSVLYNSTFFSTFKCYGVSATKLNDLCFSNVYADSFVVKGDDVRQIAPGQTGVIADYNYKLPDDFMGCVLAWNTRNIDATSTGNYNYKYRYLRHGKLRPFERDISNVPFSPDGKPCTPPALNCYWPLNDYGFYTTTGIGYQPYRVVVLSFELLNAPATVCGPKKSTNLVKNKCVNFNFNGLTGTGVLTESNKKFLPFQQFGRDIADTTDAVRDPQTLEILDITPCSFGGVSVITPGTNTSNQVAVLYQDVNCTEVPVAIHADQLTPTWRVYSTGSNVFQTRAGCLIGAEHVNNSYECDIPIGAGICASYQTQTNSPGSASSVASQSIIAYTMSLGAENSVAYSNNSIAIPTNFTISVTTEILPVSMTKTSVDCTMYICGDSTECSNLLLQYGSFCTQLNRALTGIAVEQDKNTQEVFAQVKQIYKTPPIKDFGGFNFSQILPDPSKPSKRSFIEDLLFNKVTLADAGFIKQYGDCLGDIAARDLICAQKFNGLTVLPPLLTDEMIAQYTSALLAGTITSGWTFGAGAALQIPFAMQMAYRFNGIGVTQNVLYENQKLIANQFNSAIGKIQDSLSSTASALGKLQDVVNQNAQALNTLVKQLSSNFGAISSVLNDILSRLDPPEAEVQIDRLITGRLQSLQTYVTQQLIRAAEIRASANLAATKMSECVLGQSKRVDFCGKGYHLMSFPQSAPHGVVFLHVTYVPAQEKNFTTAPAICHDGKAHFPREGVFVSNGTHWFVTQRNFYEPQIITTDNTFVSGNCDVVIGIVNNTVYDPLQSELDSIKEELDKIHKNGSGGSGDIIKLLNEQVNKEMQSSNLYMSMSSWCYTHSLDGAGLFLFDHAAEEYEHAKKLIIFLNENNVPVQLTSISAPEHKFEGLTQIFQKAYEHEQHISESINNIVDHAIKSKDHATFNFLQWYVAEQHEEEVLFKDILDKIELIGNENHGLYLADQYVKGIAKSRKSGS

SEQ ID NO: 319 - protein, 1722 aa, synthetic construct
NITNLCPFGQVFNASNFPSVYAWERLRISDCVADYAVLYNSSSSFSTFKCYGVSPTKLNDLCFSSVYADYFVVKGDDVRQIAPAQTGVIADYNYKLPDDFTGCVLAWNTNSVDSKSGNNFYYRLFRHGKIKPYERDISNVLYNSAGGTCSSISQLGCYEPLKSYGFWPTVGVGYQPYRVVVLSFELLNAPATVCGPGSGGSGNITNLCPFDEVFNATRFASVYAWNRKRISNCVADYSVLYNFAPFFAFKCYGVSPTKLNDLCFTNVYADSFVIRGNEVSQIAPGQTGNIADYNYKLPDDFTGCVIAWNSNKLDSKVGGNYNYRYRLFRKSNLKPFERDISTEIYQAGNKPCNGVAGVNCYFPLQSYGFRPTYGVGHQPYRVVVLSFELLHAPATVCGPGSGGSGSSQCVNLTTRTQLPPAYTNSFTRGVYYPDKVFRSSVLHSTQDLFLPFFSNVTWFHAIHVSGTNGTKRFDNPVLPFNDGVYFASTEKSNIIRGWIFGTTLDSKTQSLLIVNNATNVVIKVCEFQFCNDPFLGVYYHKNNKSWMESEFRVYSSANNCTFEYVSQPFLMDLEGKQGNFKNLREFVFKNIDGYFKIYSKHTPINLVRDLPQGFSALEPLVDLPIGINITRFQTLLALHRSYLTPGDSSSGWTAGAAAYYVGYLQPRTFLLKYNENGTITDAVDCALDPLSETKCTLKSFTVEKGIYQTSNFRVQPTESIVRFPNITNLCPFGEVFNATKFPSVYAWERKKISNCVADYSVLYNSTFFSTFKCYGVSATKLNDLCFSNVYADSFVVKGDDVRQIAPGQTGVIADYNYKLPDDFMGCVLAWNTRNIDATSTGNYNYKYRYLRHGKLRPFERDISNVPFSPDGKPCTPPALNCYWPLNDYGFYTTTGIGYQPYRVVVLSFELLNAPATVCGPKKSTNLVKNKCVNFNFNGLTGTGVLTESNKKFLPFQQFGRDIADTTDAVRDPQTLEILDITPCSFGGVSVITPGTNTSNQVAVLYQDVNCTEVPVAIHADQLTPTWRVYSTGSNVFQTRAGCLIGAEHVNNSYECDIPIGAGICASYQTQTNSPGSASSVASQSIIAYTMSLGAENSVAYSNNSIAIPTNFTISVTTEILPVSMTKTSVDCTMYICGDSTECSNLLLQYGSFCTQLNRALTGIAVEQDKNTQEVFAQVKQIYKTPPIKDFGGFNFSQILPDPSKPSKRSFIEDLLFNKVTLADAGFIKQYGDCLGDIAARDLICAQKFNGLTVLPPLLTDEMIAQYTSALLAGTITSGWTFGAGAALQIPFAMQMAYRFNGIGVTQNVLYENQKLIANQFNSAIGKIQDSLSSTASALGKLQDVVNQNAQALNTLVKQLSSNFGAISSVLNDILSRLDPPEAEVQIDRLITGRLQSLQTYVTQQLIRAAEIRASANLAATKMSECVLGQSKRVDFCGKGYHLMSFPQSAPHGVVFLHVTYVPAQEKNFTTAPAICHDGKAHFPREGVFVSNGTHWFVTQRNFYEPQIITTDNTFVSGNCDVVIGIVNNTVYDPLQSELDSIKEELDKIHKNGSGGSGDIIKLLNEQVNKEMQSSNLYMSMSSWCYTHSLDGAGLFLFDHAAEEYEHAKKLIIFLNENNVPVQLTSISAPEHKFEGLTQIFQKAYEHEQHISESINNIVDHAIKSKDHATFNFLQWYVAEQHEEEVLFKDILDKIELIGNENHGLYLADQYVKGIAKSRKSGS

SEQ ID NO: 320 - protein, 1722 aa, synthetic construct
NITNLCPFGQVFNASNFPSVYAWERLRISDCVADYAVLYNSSSSFSTFKCYGVSPTKLNDLCFSSVYADYFVVKGDDVRQIAPAQTGVIADYNYKLPDDFTGCVLAWNTNSVDSKSGNNFYYRLFRHGKIKPYERDISNVLYNSAGGTCSSISQLGCYEPLYSYGFWPTVGVGYQPYRVVVLSFELLNAPATVCGPGSGGSGNITNLCPFDEVFNATRFASVYAWNRKRISNCVADYSVLYNFAPFFAFKCYGVSPTKLNDLCFTNVYADSFVIRGNEVSQIAPGQTGNIADYNYKLPDDFTGCVIAWNSNKLDSKVGGNYNYRYRLFRKSNLKPFERDISTEIYQAGNKPCNGVAGVNCYFPLQSYGFRPTYGVGHQPYRVVVLSFELLHAPATVCGPGSGGSGSSQCVNLTTRTQLPPAYTNSFTRGVYYPDKVFRSSVLHSTQDLFLPFFSNVTWFHAIHVSGTNGTKRFDNPVLPFNDGVYFASTEKSNIIRGWIFGTTLDSKTQSLLIVNNATNVVIKVCEFQFCNDPFLGVYYHKNNKSWMESEFRVYSSANNCTFEYVSQPFLMDLEGKQGNFKNLREFVFKNIDGYFKIYSKHTPINLVRDLPQGFSALEPLVDLPIGINITRFQTLLALHRSYLTPGDSSSGWTAGAAAYYVGYLQPRTFLLKYNENGTITDAVDCALDPLSETKCTLKSFTVEKGIYQTSNFRVQPTESIVRFPNITNLCPFGEVFNATKFPSVYAWERKKISNCVADYSVLYNSTFFSTFKCYGVSATKLNDLCFSNVYADSFVVKGDDVRQIAPGQTGVIADYNYKLPDDFMGCVLAWNTRNIDATSTGNYNYKYRYLRHGKLRPFERDISNVPFSPDGKPCTPPALNCYWPLNDYGFYTTTGIGYQPYRVVVLSFELLNAPATVCGPKKSTNLVKNKCVNFNFNGLTGTGVLTESNKKFLPFQQFGRDIADTTDAVRDPQTLEILDITPCSFGGVSVITPGTNTSNQVAVLYQDVNCTEVPVAIHADQLTPTWRVYSTGSNVFQTRAGCLIGAEHVNNSYECDIPIGAGICASYQTQTNSPGSASSVASQSIIAYTMSLGAENSVAYSNNSIAIPTNFTISVTTEILPVSMTKTSVDCTMYICGDSTECSNLLLQYGSFCTQLNRALTGIAVEQDKNTQEVFAQVKQIYKTPPIKDFGGFNFSQILPDPSKPSKRSFIEDLLFNKVTLADAGFIKQYGDCLGDIAARDLICAQKFNGLTVLPPLLTDEMIAQYTSALLAGTITSGWTFGAGAALQIPFAMQMAYRFNGIGVTQNVLYENQKLIANQFNSAIGKIQDSLSSTASALGKLQDVVNQNAQALNTLVKQLSSNFGAISSVLNDILSRLDPPEAEVQIDRLITGRLQSLQTYVTQQLIRAAEIRASANLAATKMSECVLGQSKRVDFCGKGYHLMSFPQSAPHGVVFLHVTYVPAQEKNFTTAPAICHDGKAHFPREGVFVSNGTHWFVTQRNFYEPQIITTDNTFVSGNCDVVIGIVNNTVYDPLQSELDSIKEELDKIHKNGSGGSGDIIKLLNEQVNKEMQSSNLYMSMSSWCYTHSLDGAGLFLFDHAAEEYEHAKKLIIFLNENNVPVQLTSISAPEHKFEGLTQIFQKAYEHEQHISESINNIVDHAIKSKDHATFNFLQWYVAEQHEEEVLFKDILDKIELIGNENHGLYLADQYVKGIAKSRKSGS

SEQ ID NO: 321 - protein, 1719 aa, synthetic construct
NITNLCPFSQVFNATRFPSVYAWTRERISNCIADYSVLYNSTSFSTFRCYGVSPTKLNDLCFSNVYADSMVVRGDEVRQIAPSQTGVIADYNYKLPDDFTGCVIAWNSKAKDENGQYFYRLFRKSKLLPFQRDVSNVTYGSGKNDGCNPSEADCYWPLLKYGFTGSVSQDYQPYRVVVLSFELLNAPATVCGPGSGGSGNITNLCPFDEVFNATRFASVYAWNRKRISNCVADYSVLYNFAPFFAFKCYGVSPTKLNDLCFTNVYADSFVIRGNEVSQIAPGQTGNIADYNYKLPDDFTGCVIAWNSNKLDSKVGGNYNYRYRLFRKSNLKPFERDISTEIYQAGNKPCNGVAGVNCYFPLQSYGFRPTYGVGHQPYRVVVLSFELLHAPATVCGPGSGGSGSSQCVNLTTRTQLPPAYTNSFTRGVYYPDKVFRSSVLHSTQDLFLPFFSNVTWFHAIHVSGTNGTKRFDNPVLPFNDGVYFASTEKSNIIRGWIFGTTLDSKTQSLLIVNNATNVVIKVCEFQFCNDPFLGVYYHKNNKSWMESEFRVYSSANNCTFEYVSQPFLMDLEGKQGNFKNLREFVFKNIDGYFKIYSKHTPINLVRDLPQGFSALEPLVDLPIGINITRFQTLLALHRSYLTPGDSSSGWTAGAAAYYVGYLQPRTFLLKYNENGTITDAVDCALDPLSETKCTLKSFTVEKGIYQTSNFRVQPTESIVRFPNITNLCPFGEVFNATKFPSVYAWERKKISNCVADYSVLYNSTFFSTFKCYGVSATKLNDLCFSNVYADSFVVKGDDVRQIAPGQTGVIADYNYKLPDDFMGCVLAWNTRNIDATSTGNYNYKYRYLRHGKLRPFERDISNVPFSPDGKPCTPPALNCYWPLNDYGFYTTTGIGYQPYRVVVLSFELLNAPATVCGPKKSTNLVKNKCVNFNFNGLTGTGVLTESNKKFLPFQQFGRDIADTTDAVRDPQTLEILDITPCSFGGVSVITPGTNTSNQVAVLYQDVNCTEVPVAIHADQLTPTWRVYSTGSNVFQTRAGCLIGAEHVNNSYECDIPIGAGICASYQTQTNSPGSASSVASQSIIAYTMSLGAENSVAYSNNSIAIPTNFTISVTTEILPVSMTKTSVDCTMYICGDSTECSNLLLQYGSFCTQLNRALTGIAVEQDKNTQEVFAQVKQIYKTPPIKDFGGFNFSQILPDPSKPSKRSFIEDLLFNKVTLADAGFIKQYGDCLGDIAARDLICAQKFNGLTVLPPLLTDEMIAQYTSALLAGTITSGWTFGAGAALQIPFAMQMAYRFNGIGVTQNVLYENQKLIANQFNSAIGKIQDSLSSTASALGKLQDVVNQNAQALNTLVKQLSSNFGAISSVLNDILSRLDPPEAEVQIDRLITGRLQSLQTYVTQQLIRAAEIRASANLAATKMSECVLGQSKRVDFCGKGYHLMSFPQSAPHGVVFLHVTYVPAQEKNFTTAPAICHDGKAHFPREGVFVSNGTHWFVTQRNFYEPQIITTDNTFVSGNCDVVIGIVNNTVYDPLQSELDSIKEELDKIHKNGSGGSGDIIKLLNEQVNKEMQSSNLYMSMSSWCYTHSLDGAGLFLFDHAAEEYEHAKKLIIFLNENNVPVQLTSISAPEHKFEGLTQIFQKAYEHEQHISESINNIVDHAIKSKDHATFNFLQWYVAEQHEEEVLFKDILDKIELIGNENHGLYLADQYVKGIAKSRKSGS

SEQ ID NO: 322 - protein, 1705 aa, synthetic construct
NITNRCPFDKVFNATRFPNVYAWERTKISDCVADYTVLYNSTSFSTFKCYGVSPSKLIDLCFTSVYADTFLIRSSEVRQVAPGETGVIADYNYKLPDDFTGCVIAWNTAKHDTGNYYYRSHRKTKLKPFERDLSSDDGNGVYTLSTYDFNPNVPVAYQATRVVVLSFELLNAPATVCGPGSGGSGNITNLCPFDEVFNATRFASVYAWNRKRISNCVADYSVLYNFAPFFAFKCYGVSPTKLNDLCFTNVYADSFVIRGNEVSQIAPGQTGNIADYNYKLPDDFTGCVIAWNSNKLDSKVGGNYNYRYRLFRKSNLKPFERDISTEIYQAGNKPCNGVAGVNCYFPLQSYGFRPTYGVGHQPYRVVVLSFELLHAPATVCGPGSGGSGSSQCVNLTTRTQLPPAYTNSFTRGVYYPDKVFRSSVLHSTQDLFLPFFSNVTWFHAIHVSGTNGTKRFDNPVLPFNDGVYFASTEKSNIIRGWIFGTTLDSKTQSLLIVNNATNVVIKVCEFQFCNDPFLGVYYHKNNKSWMESEFRVYSSANNCTFEYVSQPFLMDLEGKQGNFKNLREFVFKNIDGYFKIYSKHTPINLVRDLPQGFSALEPLVDLPIGINITRFQTLLALHRSYLTPGDSSSGWTAGAAAYYVGYLQPRTFLLKYNENGTITDAVDCALDPLSETKCTLKSFTVEKGIYQTSNFRVQPTESIVRFPNITNLCPFGEVFNATKFPSVYAWERKKISNCVADYSVLYNSTFFSTFKCYGVSATKLNDLCFSNVYADSFVVKGDDVRQIAPGQTGVIADYNYKLPDDFMGCVLAWNTRNIDATSTGNYNYKYRYLRHGKLRPFERDISNVPFSPDGKPCTPPALNCYWPLNDYGFYTTTGIGYQPYRVVVLSFELLNAPATVCGPKKSTNLVKNKCVNFNFNGLTGTGVLTESNKKFLPFQQFGRDIADTTDAVRDPQTLEILDITPCSFGGVSVITPGTNTSNQVAVLYQDVNCTEVPVAIHADQLTPTWRVYSTGSNVFQTRAGCLIGAEHVNNSYECDIPIGAGICASYQTQTNSPGSASSVASQSIIAYTMSLGAENSVAYSNNSIAIPTNFTISVTTEILPVSMTKTSVDCTMYICGDSTECSNLLLQYGSFCTQLNRALTGIAVEQDKNTQEVFAQVKQIYKTPPIKDFGGFNFSQILPDPSKPSKRSFIEDLLFNKVTLADAGFIKQYGDCLGDIAARDLICAQKFNGLTVLPPLLTDEMIAQYTSALLAGTITSGWTFGAGAALQIPFAMQMAYRFNGIGVTQNVLYENQKLIANQFNSAIGKIQDSLSSTASALGKLQDVVNQNAQALNTLVKQLSSNFGAISSVLNDILSRLDPPEAEVQIDRLITGRLQSLQTYVTQQLIRAAEIRASANLAATKMSECVLGQSKRVDFCGKGYHLMSFPQSAPHGVVFLHVTYVPAQEKNFTTAPAICHDGKAHFPREGVFVSNGTHWFVTQRNFYEPQIITTDNTFVSGNCDVVIGIVNNTVYDPLQSELDSIKEELDKIHKNGSGGSGDIIKLLNEQVNKEMQSSNLYMSMSSWCYTHSLDGAGLFLFDHAAEEYEHAKKLIIFLNENNVPVQLTSISAPEHKFEGLTQIFQKAYEHEQHISESINNIVDHAIKSKDHATFNFLQWYVAEQHEEEVLFKDILDKIELIGNENHGLYLADQYVKGIAKSRKSGS

SEQ ID NO: 323 - protein, 1720 aa, synthetic construct
NVTQLCPFSDVFNRTMFPSVYAWERMSIRDCVADYAVLYNSSISFSTFECYGVSPTKLNDLCFSSVYADYFVVRGDDVKQIAPGKTGVIADYNYKLPDDFVGCVLAWNSRHVDNKQGFYYRLFRHGKIKPYQRDMSRELYSPSGTPCTVVGFNCYDPLAHYAFASPGIGIGYQPFRVVVLSFQLLNAPATVCGPGSGGSGNITNLCPFDEVFNATRFASVYAWNRKRISNCVADYSVLYNFAPFFAFKCYGVSPTKLNDLCFTNVYADSFVIRGNEVSQIAPGQTGNIADYNYKLPDDFTGCVIAWNSNKLDSKVGGNYNYRYRLFRKSNLKPFERDISTEIYQAGNKPCNGVAGVNCYFPLQSYGFRPTYGVGHQPYRVVVLSFELLHAPATVCGPGSGGSGSSQCVNLTTRTQLPPAYTNSFTRGVYYPDKVFRSSVLHSTQDLFLPFFSNVTWFHAIHVSGTNGTKRFDNPVLPFNDGVYFASTEKSNIIRGWIFGTTLDSKTQSLLIVNNATNVVIKVCEFQFCNDPFLGVYYHKNNKSWMESEFRVYSSANNCTFEYVSQPFLMDLEGKQGNFKNLREFVFKNIDGYFKIYSKHTPINLVRDLPQGFSALEPLVDLPIGINITRFQTLLALHRSYLTPGDSSSGWTAGAAAYYVGYLQPRTFLLKYNENGTITDAVDCALDPLSETKCTLKSFTVEKGIYQTSNFRVQPTESIVRFPNITNLCPFGEVFNATKFPSVYAWERKKISNCVADYSVLYNSTFFSTFKCYGVSATKLNDLCFSNVYADSFVVKGDDVRQIAPGQTGVIADYNYKLPDDFMGCVLAWNTRNIDATSTGNYNYKYRYLRHGKLRPFERDISNVPFSPDGKPCTPPALNCYWPLNDYGFYTTTGIGYQPYRVVVLSFELLNAPATVCGPKKSTNLVKNKCVNFNFNGLTGTGVLTESNKKFLPFQQFGRDIADTTDAVRDPQTLEILDITPCSFGGVSVITPGTNTSNQVAVLYQDVNCTEVPVAIHADQLTPTWRVYSTGSNVFQTRAGCLIGAEHVNNSYECDIPIGAGICASYQTQTNSPGSASSVASQSIIAYTMSLGAENSVAYSNNSIAIPTNFTISVTTEILPVSMTKTSVDCTMYICGDSTECSNLLLQYGSFCTQLNRALTGIAVEQDKNTQEVFAQVKQIYKTPPIKDFGGFNFSQILPDPSKPSKRSFIEDLLFNKVTLADAGFIKQYGDCLGDIAARDLICAQKFNGLTVLPPLLTDEMIAQYTSALLAGTITSGWTFGAGAALQIPFAMQMAYRFNGIGVTQNVLYENQKLIANQFNSAIGKIQDSLSSTASALGKLQDVVNQNAQALNTLVKQLSSNFGAISSVLNDILSRLDPPEAEVQIDRLITGRLQSLQTYVTQQLIRAAEIRASANLAATKMSECVLGQSKRVDFCGKGYHLMSFPQSAPHGVVFLHVTYVPAQEKNFTTAPAICHDGKAHFPREGVFVSNGTHWFVTQRNFYEPQIITTDNTFVSGNCDVVIGIVNNTVYDPLQSELDSIKEELDKIHKNGSGGSGDIIKLLNEQVNKEMQSSNLYMSMSSWCYTHSLDGAGLFLFDHAAEEYEHAKKLIIFLNENNVPVQLTSISAPEHKFEGLTQIFQKAYEHEQHISESINNIVDHAIKSKDHATFNFLQWYVAEQHEEEVLFKDILDKIELIGNENHGLYLADQYVKGIAKSRKSGS

SEQ ID NO: 324 - protein, 1722 aa, synthetic construct
NITNLCPFDEVFNATRFPSVYAWERKKISNCVADYSVLYNSTSFSTFKCYGVSPSKLNDLCFTSVYADSFVIRGDEVRQIAPGQTGVIADYNYKLPDDFTGCVIAWNTANQDSGEGGNPNYYYRSSRKSKLKPFERDLSSDEYNVGSQPCNRMGPNCYRTLSTYDFYPTVGVGYQPYRVVVLSFELLNAPATVCGPGSGGSGNITNLCPFDEVFNATRFASVYAWNRKRISNCVADYSVLYNFAPFFAFKCYGVSPTKLNDLCFTNVYADSFVIRGNEVSQIAPGQTGNIADYNYKLPDDFTGCVIAWNSNKLDSKVGGNYNYRYRLFRKSNLKPFERDISTEIYQAGNKPCNGVAGVNCYFPLQSYGFRPTYGVGHQPYRVVVLSFELLHAPATVCGPGSGGSGSSQCVNLTTRTQLPPAYTNSFTRGVYYPDKVFRSSVLHSTQDLFLPFFSNVTWFHAIHVSGTNGTKRFDNPVLPFNDGVYFASTEKSNIIRGWIFGTTLDSKTQSLLIVNNATNVVIKVCEFQFCNDPFLGVYYHKNNKSWMESEFRVYSSANNCTFEYVSQPFLMDLEGKQGNFKNLREFVFKNIDGYFKIYSKHTPINLVRDLPQGFSALEPLVDLPIGINITRFQTLLALHRSYLTPGDSSSGWTAGAAAYYVGYLQPRTFLLKYNENGTITDAVDCALDPLSETKCTLKSFTVEKGIYQTSNFRVQPTESIVRFPNITNLCPFGEVFNATKFPSVYAWERKKISNCVADYSVLYNSTFFSTFKCYGVSATKLNDLCFSNVYADSFVVKGDDVRQIAPGQTGVIADYNYKLPDDFMGCVLAWNTRNIDATSTGNYNYKYRYLRHGKLRPFERDISNVPFSPDGKPCTPPALNCYWPLNDYGFYTTTGIGYQPYRVVVLSFELLNAPATVCGPKKSTNLVKNKCVNFNFNGLTGTGVLTESNKKFLPFQQFGRDIADTTDAVRDPQTLEILDITPCSFGGVSVITPGTNTSNQVAVLYQDVNCTEVPVAIHADQLTPTWRVYSTGSNVFQTRAGCLIGAEHVNNSYECDIPIGAGICASYQTQTNSPGSASSVASQSIIAYTMSLGAENSVAYSNNSIAIPTNFTISVTTEILPVSMTKTSVDCTMYICGDSTECSNLLLQYGSFCTQLNRALTGIAVEQDKNTQEVFAQVKQIYKTPPIKDFGGFNFSQILPDPSKPSKRSFIEDLLFNKVTLADAGFIKQYGDCLGDIAARDLICAQKFNGLTVLPPLLTDEMIAQYTSALLAGTITSGWTFGAGAALQIPFAMQMAYRFNGIGVTQNVLYENQKLIANQFNSAIGKIQDSLSSTASALGKLQDVVNQNAQALNTLVKQLSSNFGAISSVLNDILSRLDPPEAEVQIDRLITGRLQSLQTYVTQQLIRAAEIRASANLAATKMSECVLGQSKRVDFCGKGYHLMSFPQSAPHGVVFLHVTYVPAQEKNFTTAPAICHDGKAHFPREGVFVSNGTHWFVTQRNFYEPQIITTDNTFVSGNCDVVIGIVNNTVYDPLQSELDSIKEELDKIHKNGSGGSGDIIKLLNEQVNKEMQSSNLYMSMSSWCYTHSLDGAGLFLFDHAAEEYEHAKKLIIFLNENNVPVQLTSISAPEHKFEGLTQIFQKAYEHEQHISESINNIVDHAIKSKDHATFNFLQWYVAEQHEEEVLFKDILDKIELIGNENHGLYLADQYVKGIAKSRKSGS

SEQ ID NO: 325 - protein, 1809 aa, synthetic construct
NLPDCNIEEWLTAKSVPSPLNWERKTFSNCNFNLSSLLRFVQADSFSCNNIDASKVYGMCFGSISVDKFAIPNSRQVDLQLGNSGFLQSFNYKIDTTATSCQLYYSLPANNVTINNYNPSSWNRRYGFNDDTVFKPRPAGVLTNHDVVYSQQCFKVPNTFCPCKNNGSCVSSGKGTTNGSGTCPAGTNYRTCENTTWCACSCTPDPITASGPRKCPQKKSLVGVGEHCSGLGVDSDYCGNVSCLCSTDAFLGWSADSCLVNDRCNIFANIILNGINSGTTCSTGSGGSGNITNLCPFDEVFNATRFASVYAWNRKRISNCVADYSVLYNFAPFFAFKCYGVSPTKLNDLCFTNVYADSFVIRGNEVSQIAPGQTGNIADYNYKLPDDFTGCVIAWNSNKLDSKVGGNYNYRYRLFRKSNLKPFERDISTEIYQAGNKPCNGVAGVNCYFPLQSYGFRPTYGVGHQPYRVVVLSFELLHAPATVCGPGSGGSGSSQCVNLTTRTQLPPAYTNSFTRGVYYPDKVFRSSVLHSTQDLFLPFFSNVTWFHAIHVSGTNGTKRFDNPVLPFNDGVYFASTEKSNIIRGWIFGTTLDSKTQSLLIVNNATNVVIKVCEFQFCNDPFLGVYYHKNNKSWMESEFRVYSSANNCTFEYVSQPFLMDLEGKQGNFKNLREFVFKNIDGYFKIYSKHTPINLVRDLPQGFSALEPLVDLPIGINITRFQTLLALHRSYLTPGDSSSGWTAGAAAYYVGYLQPRTFLLKYNENGTITDAVDCALDPLSETKCTLKSFTVEKGIYQTSNFRVQPTESIVRFPNITNLCPFGEVFNATKFPSVYAWERKKISNCVADYSVLYNSTFFSTFKCYGVSATKLNDLCFSNVYADSFVVKGDDVRQIAPGQTGVIADYNYKLPDDFMGCVLAWNTRNIDATSTGNYNYKYRYLRHGKLRPFERDISNVPFSPDGKPCTPPALNCYWPLNDYGFYTTTGIGYQPYRVVVLSFELLNAPATVCGPKKSTNLVKNKCVNFNFNGLTGTGVLTESNKKFLPFQQFGRDIADTTDAVRDPQTLEILDITPCSFGGVSVITPGTNTSNQVAVLYQDVNCTEVPVAIHADQLTPTWRVYSTGSNVFQTRAGCLIGAEHVNNSYECDIPIGAGICASYQTQTNSPGSASSVASQSIIAYTMSLGAENSVAYSNNSIAIPTNFTISVTTEILPVSMTKTSVDCTMYICGDSTECSNLLLQYGSFCTQLNRALTGIAVEQDKNTQEVFAQVKQIYKTPPIKDFGGFNFSQILPDPSKPSKRSFIEDLLFNKVTLADAGFIKQYGDCLGDIAARDLICAQKFNGLTVLPPLLTDEMIAQYTSALLAGTITSGWTFGAGAALQIPFAMQMAYRFNGIGVTQNVLYENQKLIANQFNSAIGKIQDSLSSTASALGKLQDVVNQNAQALNTLVKQLSSNFGAISSVLNDILSRLDPPEAEVQIDRLITGRLQSLQTYVTQQLIRAAEIRASANLAATKMSECVLGQSKRVDFCGKGYHLMSFPQSAPHGVVFLHVTYVPAQEKNFTTAPAICHDGKAHFPREGVFVSNGTHWFVTQRNFYEPQIITTDNTFVSGNCDVVIGIVNNTVYDPLQSELDSIKEELDKIHKNGSGGSGDIIKLLNEQVNKEMQSSNLYMSMSSWCYTHSLDGAGLFLFDHAAEEYEHAKKLIIFLNENNVPVQLTSISAPEHKFEGLTQIFQKAYEHEQHISESINNIVDHAIKSKDHATFNFLQWYVAEQHEEEVLFKDILDKIELIGNENHGLYLADQYVKGIAKSRKSGS

SEQ ID NO: 326 - protein, 1735 aa, synthetic construct
QGVECDFSKLFKAAAPQIYNFSRLVFTNCNYNLTKLLSLFQVDEFSCHQISPSALASGCYSSLTVDYFAYPLSMKSYLQIGSAGEISQFNYKQDFSNPTCRILASVPANVSITKPDKYIYISQCYSLSAYSDVDVPHYVNPGQYTSIPCLYLTSSGFDEDGQYFRYNLTQFEGQNYLVATGVTVSMTDNLQMVFVITVQYGTDTNSVCPGSGGSGNITNLCPFDEVFNATRFASVYAWNRKRISNCVADYSVLYNFAPFFAFKCYGVSPTKLNDLCFTNVYADSFVIRGNEVSQIAPGQTGNIADYNYKLPDDFTGCVIAWNSNKLDSKVGGNYNYRYRLFRKSNLKPFERDISTEIYQAGNKPCNGVAGVNCYFPLQSYGFRPTYGVGHQPYRVVVLSFELLHAPATVCGPGSGGSGSSQCVNLTTRTQLPPAYTNSFTRGVYYPDKVFRSSVLHSTQDLFLPFFSNVTWFHAIHVSGTNGTKRFDNPVLPFNDGVYFASTEKSNIIRGWIFGTTLDSKTQSLLIVNNATNVVIKVCEFQFCNDPFLGVYYHKNNKSWMESEFRVYSSANNCTFEYVSQPFLMDLEGKQGNFKNLREFVFKNIDGYFKIYSKHTPINLVRDLPQGFSALEPLVDLPIGINITRFQTLLALHRSYLTPGDSSSGWTAGAAAYYVGYLQPRTFLLKYNENGTITDAVDCALDPLSETKCTLKSFTVEKGIYQTSNFRVQPTESIVRFPNITNLCPFGEVFNATKFPSVYAWERKKISNCVADYSVLYNSTFFSTFKCYGVSATKLNDLCFSNVYADSFVVKGDDVRQIAPGQTGVIADYNYKLPDDFMGCVLAWNTRNIDATSTGNYNYKYRYLRHGKLRPFERDISNVPFSPDGKPCTPPALNCYWPLNDYGFYTTTGIGYQPYRVVVLSFELLNAPATVCGPKKSTNLVKNKCVNFNFNGLTGTGVLTESNKKFLPFQQFGRDIADTTDAVRDPQTLEILDITPCSFGGVSVITPGTNTSNQVAVLYQDVNCTEVPVAIHADQLTPTWRVYSTGSNVFQTRAGCLIGAEHVNNSYECDIPIGAGICASYQTQTNSPGSASSVASQSIIAYTMSLGAENSVAYSNNSIAIPTNFTISVTTEILPVSMTKTSVDCTMYICGDSTECSNLLLQYGSFCTQLNRALTGIAVEQDKNTQEVFAQVKQIYKTPPIKDFGGFNFSQILPDPSKPSKRSFIEDLLFNKVTLADAGFIKQYGDCLGDIAARDLICAQKFNGLTVLPPLLTDEMIAQYTSALLAGTITSGWTFGAGAALQIPFAMQMAYRFNGIGVTQNVLYENQKLIANQFNSAIGKIQDSLSSTASALGKLQDVVNQNAQALNTLVKQLSSNFGAISSVLNDILSRLDPPEAEVQIDRLITGRLQSLQTYVTQQLIRAAEIRASANLAATKMSECVLGQSKRVDFCGKGYHLMSFPQSAPHGVVFLHVTYVPAQEKNFTTAPAICHDGKAHFPREGVFVSNGTHWFVTQRNFYEPQIITTDNTFVSGNCDVVIGIVNNTVYDPLQSELDSIKEELDKIHKNGSGGSGDIIKLLNEQVNKEMQSSNLYMSMSSWCYTHSLDGAGLFLFDHAAEEYEHAKKLIIFLNENNVPVQLTSISAPEHKFEGLTQIFQKAYEHEQHISESINNIVDHAIKSKDHATFNFLQWYVAEQHEEEVLFKDILDKIELIGNENHGLYLADQYVKGIAKSRKSGS

SEQ ID NO: 327 - protein, 1734 aa, synthetic construct
ELTECDLDVLFKNDAPIIANYSRRVFTNCNYNLTKLLSLVQVDEFVCHKTTPEALATGCYSSLTVDWFALPFSMKSTLAIGSAEAISMFNYNQDYSNPTCRIHAAVTANVSTALNFTANANYAYISRCQGVDGKPILLQPGQMTNIACRSGVLARPSDADYFGYSFQGRNYYLGRKSYKPKTDEGDVQMVYVITPKYDKGPDTVCPLKGSGGSGNITNLCPFDEVFNATRFASVYAWNRKRISNCVADYSVLYNFAPFFAFKCYGVSPTKLNDLCFTNVYADSFVIRGNEVSQIAPGQTGNIADYNYKLPDDFTGCVIAWNSNKLDSKVGGNYNYRYRLFRKSNLKPFERDISTEIYQAGNKPCNGVAGVNCYFPLQSYGFRPTYGVGHQPYRVVVLSFELLHAPATVCGPGSGGSGSSQCVNLTTRTQLPPAYTNSFTRGVYYPDKVFRSSVLHSTQDLFLPFFSNVTWFHAIHVSGTNGTKRFDNPVLPFNDGVYFASTEKSNIIRGWIFGTTLDSKTQSLLIVNNATNVVIKVCEFQFCNDPFLGVYYHKNNKSWMESEFRVYSSANNCTFEYVSQPFLMDLEGKQGNFKNLREFVFKNIDGYFKIYSKHTPINLVRDLPQGFSALEPLVDLPIGINITRFQTLLALHRSYLTPGDSSSGWTAGAAAYYVGYLQPRTFLLKYNENGTITDAVDCALDPLSETKCTLKSFTVEKGIYQTSNFRVQPTESIVRFPNITNLCPFGEVFNATKFPSVYAWERKKISNCVADYSVLYNSTFFSTFKCYGVSATKLNDLCFSNVYADSFVVKGDDVRQIAPGQTGVIADYNYKLPDDFMGCVLAWNTRNIDATSTGNYNYKYRYLRHGKLRPFERDISNVPFSPDGKPCTPPALNCYWPLNDYGFYTTTGIGYQPYRVVVLSFELLNAPATVCGPKKSTNLVKNKCVNFNFNGLTGTGVLTESNKKFLPFQQFGRDIADTTDAVRDPQTLEILDITPCSFGGVSVITPGTNTSNQVAVLYQDVNCTEVPVAIHADQLTPTWRVYSTGSNVFQTRAGCLIGAEHVNNSYECDIPIGAGICASYQTQTNSPGSASSVASQSIIAYTMSLGAENSVAYSNNSIAIPTNFTISVTTEILPVSMTKTSVDCTMYICGDSTECSNLLLQYGSFCTQLNRALTGIAVEQDKNTQEVFAQVKQIYKTPPIKDFGGFNFSQILPDPSKPSKRSFIEDLLFNKVTLADAGFIKQYGDCLGDIAARDLICAQKFNGLTVLPPLLTDEMIAQYTSALLAGTITSGWTFGAGAALQIPFAMQMAYRFNGIGVTQNVLYENQKLIANQFNSAIGKIQDSLSSTASALGKLQDVVNQNAQALNTLVKQLSSNFGAISSVLNDILSRLDPPEAEVQIDRLITGRLQSLQTYVTQQLIRAAEIRASANLAATKMSECVLGQSKRVDFCGKGYHLMSFPQSAPHGVVFLHVTYVPAQEKNFTTAPAICHDGKAHFPREGVFVSNGTHWFVTQRNFYEPQIITTDNTFVSGNCDVVIGIVNNTVYDPLQSELDSIKEELDKIHKNGSGGSGDIIKLLNEQVNKEMQSSNLYMSMSSWCYTHSLDGAGLFLFDHAAEEYEHAKKLIIFLNENNVPVQLTSISAPEHKFEGLTQIFQKAYEHEQHISESINNIVDHAIKSKDHATFNFLQWYVAEQHEEEVLFKDILDKIELIGNENHGLYLADQYVKGIAKSRKSGS

SEQ ID NO: 328 - protein, 1730 aa, synthetic construct
VYPDCNFTELFRERAPTIMQYKREVFTRCNYNLSLLLSLVQVDEFVCDKITPEALATGCYSSLTVDWFAFPYAWKSYLAIGSADRIVRFNYNQDYSNPSCRIHSKVNSSIGISYAGAYSYITNCNYGATNKDDVVKPGGRASQQCITGALNSPTTGQLWAYNFGGVPYRVSRLTYTDHLSDPLDMVYVITVKYEPGAETVCPKQGSGGSGNITNLCPFDEVFNATRFASVYAWNRKRISNCVADYSVLYNFAPFFAFKCYGVSPTKLNDLCFTNVYADSFVIRGNEVSQIAPGQTGNIADYNYKLPDDFTGCVIAWNSNKLDSKVGGNYNYRYRLFRKSNLKPFERDISTEIYQAGNKPCNGVAGVNCYFPLQSYGFRPTYGVGHQPYRVVVLSFELLHAPATVCGPGSGGSGSSQCVNLTTRTQLPPAYTNSFTRGVYYPDKVFRSSVLHSTQDLFLPFFSNVTWFHAIHVSGTNGTKRFDNPVLPFNDGVYFASTEKSNIIRGWIFGTTLDSKTQSLLIVNNATNVVIKVCEFQFCNDPFLGVYYHKNNKSWMESEFRVYSSANNCTFEYVSQPFLMDLEGKQGNFKNLREFVFKNIDGYFKIYSKHTPINLVRDLPQGFSALEPLVDLPIGINITRFQTLLALHRSYLTPGDSSSGWTAGAAAYYVGYLQPRTFLLKYNENGTITDAVDCALDPLSETKCTLKSFTVEKGIYQTSNFRVQPTESIVRFPNITNLCPFGEVFNATKFPSVYAWERKKISNCVADYSVLYNSTFFSTFKCYGVSATKLNDLCFSNVYADSFVVKGDDVRQIAPGQTGVIADYNYKLPDDFMGCVLAWNTRNIDATSTGNYNYKYRYLRHGKLRPFERDISNVPFSPDGKPCTPPALNCYWPLNDYGFYTTTGIGYQPYRVVVLSFELLNAPATVCGPKKSTNLVKNKCVNFNFNGLTGTGVLTESNKKFLPFQQFGRDIADTTDAVRDPQTLEILDITPCSFGGVSVITPGTNTSNQVAVLYQDVNCTEVPVAIHADQLTPTWRVYSTGSNVFQTRAGCLIGAEHVNNSYECDIPIGAGICASYQTQTNSPGSASSVASQSIIAYTMSLGAENSVAYSNNSIAIPTNFTISVTTEILPVSMTKTSVDCTMYICGDSTECSNLLLQYGSFCTQLNRALTGIAVEQDKNTQEVFAQVKQIYKTPPIKDFGGFNFSQILPDPSKPSKRSFIEDLLFNKVTLADAGFIKQYGDCLGDIAARDLICAQKFNGLTVLPPLLTDEMIAQYTSALLAGTITSGWTFGAGAALQIPFAMQMAYRFNGIGVTQNVLYENQKLIANQFNSAIGKIQDSLSSTASALGKLQDVVNQNAQALNTLVKQLSSNFGAISSVLNDILSRLDPPEAEVQIDRLITGRLQSLQTYVTQQLIRAAEIRASANLAATKMSECVLGQSKRVDFCGKGYHLMSFPQSAPHGVVFLHVTYVPAQEKNFTTAPAICHDGKAHFPREGVFVSNGTHWFVTQRNFYEPQIITTDNTFVSGNCDVVIGIVNNTVYDPLQSELDSIKEELDKIHKNGSGGSGDIIKLLNEQVNKEMQSSNLYMSMSSWCYTHSLDGAGLFLFDHAAEEYEHAKKLIIFLNENNVPVQLTSISAPEHKFEGLTQIFQKAYEHEQHISESINNIVDHAIKSKDHATFNFLQWYVAEQHEEEVLFKDILDKIELIGNENHGLYLADQYVKGIAKSRKSGS

SEQ ID NO: 329 - protein, 1736 aa, synthetic construct
QATECDFSPMLTGVAPQVYNFKRLVFSNCNYNLTKLLSLFAVDEFSCNGISPDAIARGCYSTLTVDYFAYPLSMKSYIRPGSAGNIPLYNYKQSFANPTCRVMASVPANVTITKPDAYGYISKCSRLTGANQDVETPLYINPGEYSICRDFSPGGFSEDGQVFKRTLTQFEGGGLLIGVGTRVPMTDNLQMSFIIFVQYGTGTDSVCPMLGSGGSGNITNLCPFDEVFNATRFASVYAWNRKRISNCVADYSVLYNFAPFFAFKCYGVSPTKLNDLCFTNVYADSFVIRGNEVSQIAPGQTGNIADYNYKLPDDFTGCVIAWNSNKLDSKVGGNYNYRYRLFRKSNLKPFERDISTEIYQAGNKPCNGVAGVNCYFPLQSYGFRPTYGVGHQPYRVVVLSFELLHAPATVCGPGSGGSGSSQCVNLTTRTQLPPAYTNSFTRGVYYPDKVFRSSVLHSTQDLFLPFFSNVTWFHAIHVSGTNGTKRFDNPVLPFNDGVYFASTEKSNIIRGWIFGTTLDSKTQSLLIVNNATNVVIKVCEFQFCNDPFLGVYYHKNNKSWMESEFRVYSSANNCTFEYVSQPFLMDLEGKQGNFKNLREFVFKNIDGYFKIYSKHTPINLVRDLPQGFSALEPLVDLPIGINITRFQTLLALHRSYLTPGDSSSGWTAGAAAYYVGYLQPRTFLLKYNENGTITDAVDCALDPLSETKCTLKSFTVEKGIYQTSNFRVQPTESIVRFPNITNLCPFGEVFNATKFPSVYAWERKKISNCVADYSVLYNSTFFSTFKCYGVSATKLNDLCFSNVYADSFVVKGDDVRQIAPGQTGVIADYNYKLPDDFMGCVLAWNTRNIDATSTGNYNYKYRYLRHGKLRPFERDISNVPFSPDGKPCTPPALNCYWPLNDYGFYTTTGIGYQPYRVVVLSFELLNAPATVCGPKKSTNLVKNKCVNFNFNGLTGTGVLTESNKKFLPFQQFGRDIADTTDAVRDPQTLEILDITPCSFGGVSVITPGTNTSNQVAVLYQDVNCTEVPVAIHADQLTPTWRVYSTGSNVFQTRAGCLIGAEHVNNSYECDIPIGAGICASYQTQTNSPGSASSVASQSIIAYTMSLGAENSVAYSNNSIAIPTNFTISVTTEILPVSMTKTSVDCTMYICGDSTECSNLLLQYGSFCTQLNRALTGIAVEQDKNTQEVFAQVKQIYKTPPIKDFGGFNFSQILPDPSKPSKRSFIEDLLFNKVTLADAGFIKQYGDCLGDIAARDLICAQKFNGLTVLPPLLTDEMIAQYTSALLAGTITSGWTFGAGAALQIPFAMQMAYRFNGIGVTQNVLYENQKLIANQFNSAIGKIQDSLSSTASALGKLQDVVNQNAQALNTLVKQLSSNFGAISSVLNDILSRLDPPEAEVQIDRLITGRLQSLQTYVTQQLIRAAEIRASANLAATKMSECVLGQSKRVDFCGKGYHLMSFPQSAPHGVVFLHVTYVPAQEKNFTTAPAICHDGKAHFPREGVFVSNGTHWFVTQRNFYEPQIITTDNTFVSGNCDVVIGIVNNTVYDPLQSELDSIKEELDKIHKNGSGGSGDIIKLLNEQVNKEMQSSNLYMSMSSWCYTHSLDGAGLFLFDHAAEEYEHAKKLIIFLNENNVPVQLTSISAPEHKFEGLTQIFQKAYEHEQHISESINNIVDHAIKSKDHATFNFLQWYVAEQHEEEVLFKDILDKIELIGNENHGLYLADQYVKGIAKSRKSGS

SEQ ID NO: 330 - protein, 1727 aa, synthetic construct
QGVECDFSKLFKAAPPQIYNFSRLVFTNCNYNLTKLLSLFHVSEFSCHQVSPSALASGCYSSLTVDYFAYPLYLASYLQQGSTGEIAQYNYKQDFSNPTCRILASVPANVSIPKPDKYIWLSQCYSFSAYSGDIPHYVQPGQYTPCLYLTSSGFDKSYQTNRDMQNKMAATGVTSSMTDNLQMAFVISVQYGTDTNSVCPMGSGGSGNITNLCPFDEVFNATRFASVYAWNRKRISNCVADYSVLYNFAPFFAFKCYGVSPTKLNDLCFTNVYADSFVIRGNEVSQIAPGQTGNIADYNYKLPDDFTGCVIAWNSNKLDSKVGGNYNYRYRLFRKSNLKPFERDISTEIYQAGNKPCNGVAGVNCYFPLQSYGFRPTYGVGHQPYRVVVLSFELLHAPATVCGPGSGGSGSSQCVNLTTRTQLPPAYTNSFTRGVYYPDKVFRSSVLHSTQDLFLPFFSNVTWFHAIHVSGTNGTKRFDNPVLPFNDGVYFASTEKSNIIRGWIFGTTLDSKTQSLLIVNNATNVVIKVCEFQFCNDPFLGVYYHKNNKSWMESEFRVYSSANNCTFEYVSQPFLMDLEGKQGNFKNLREFVFKNIDGYFKIYSKHTPINLVRDLPQGFSALEPLVDLPIGINITRFQTLLALHRSYLTPGDSSSGWTAGAAAYYVGYLQPRTFLLKYNENGTITDAVDCALDPLSETKCTLKSFTVEKGIYQTSNFRVQPTESIVRFPNITNLCPFGEVFNATKFPSVYAWERKKISNCVADYSVLYNSTFFSTFKCYGVSATKLNDLCFSNVYADSFVVKGDDVRQIAPGQTGVIADYNYKLPDDFMGCVLAWNTRNIDATSTGNYNYKYRYLRHGKLRPFERDISNVPFSPDGKPCTPPALNCYWPLNDYGFYTTTGIGYQPYRVVVLSFELLNAPATVCGPKKSTNLVKNKCVNFNFNGLTGTGVLTESNKKFLPFQQFGRDIADTTDAVRDPQTLEILDITPCSFGGVSVITPGTNTSNQVAVLYQDVNCTEVPVAIHADQLTPTWRVYSTGSNVFQTRAGCLIGAEHVNNSYECDIPIGAGICASYQTQTNSPGSASSVASQSIIAYTMSLGAENSVAYSNNSIAIPTNFTISVTTEILPVSMTKTSVDCTMYICGDSTECSNLLLQYGSFCTQLNRALTGIAVEQDKNTQEVFAQVKQIYKTPPIKDFGGFNFSQILPDPSKPSKRSFIEDLLFNKVTLADAGFIKQYGDCLGDIAARDLICAQKFNGLTVLPPLLTDEMIAQYTSALLAGTITSGWTFGAGAALQIPFAMQMAYRFNGIGVTQNVLYENQKLIANQFNSAIGKIQDSLSSTASALGKLQDVVNQNAQALNTLVKQLSSNFGAISSVLNDILSRLDPPEAEVQIDRLITGRLQSLQTYVTQQLIRAAEIRASANLAATKMSECVLGQSKRVDFCGKGYHLMSFPQSAPHGVVFLHVTYVPAQEKNFTTAPAICHDGKAHFPREGVFVSNGTHWFVTQRNFYEPQIITTDNTFVSGNCDVVIGIVNNTVYDPLQSELDSIKEELDKIHKNGSGGSGDIIKLLNEQVNKEMQSSNLYMSMSSWCYTHSLDGAGLFLFDHAAEEYEHAKKLIIFLNENNVPVQLTSISAPEHKFEGLTQIFQKAYEHEQHISESINNIVDHAIKSKDHATFNFLQWYVAEQHEEEVLFKDILDKIELIGNENHGLYLADQYVKGIAKSRKSGS

SEQ ID NO: 331 - protein, 1727 aa, synthetic construct
QGVECDFSKLFKAAPPQIYNFSRLVFTNCNYNLTKLLSLFHVSEFSCHQVSPSALASGCYSSLTVDYFAYPLYLASYLQQGSTGEIAQYNYKQDFSNPTCRILASVPANVSIPKPDKYIWLSQCYSFSAYSGDVPHYVLPGQYTPCLYLTSSGFDNSYQTNRDFQNKMAATGVISSMTDNLQMAFVISVQYGTDTNSVCPMGSGGSGNITNLCPFDEVFNATRFASVYAWNRKRISNCVADYSVLYNFAPFFAFKCYGVSPTKLNDLCFTNVYADSFVIRGNEVSQIAPGQTGNIADYNYKLPDDFTGCVIAWNSNKLDSKVGGNYNYRYRLFRKSNLKPFERDISTEIYQAGNKPCNGVAGVNCYFPLQSYGFRPTYGVGHQPYRVVVLSFELLHAPATVCGPGSGGSGSSQCVNLTTRTQLPPAYTNSFTRGVYYPDKVFRSSVLHSTQDLFLPFFSNVTWFHAIHVSGTNGTKRFDNPVLPFNDGVYFASTEKSNIIRGWIFGTTLDSKTQSLLIVNNATNVVIKVCEFQFCNDPFLGVYYHKNNKSWMESEFRVYSSANNCTFEYVSQPFLMDLEGKQGNFKNLREFVFKNIDGYFKIYSKHTPINLVRDLPQGFSALEPLVDLPIGINITRFQTLLALHRSYLTPGDSSSGWTAGAAAYYVGYLQPRTFLLKYNENGTITDAVDCALDPLSETKCTLKSFTVEKGIYQTSNFRVQPTESIVRFPNITNLCPFGEVFNATKFPSVYAWERKKISNCVADYSVLYNSTFFSTFKCYGVSATKLNDLCFSNVYADSFVVKGDDVRQIAPGQTGVIADYNYKLPDDFMGCVLAWNTRNIDATSTGNYNYKYRYLRHGKLRPFERDISNVPFSPDGKPCTPPALNCYWPLNDYGFYTTTGIGYQPYRVVVLSFELLNAPATVCGPKKSTNLVKNKCVNFNFNGLTGTGVLTESNKKFLPFQQFGRDIADTTDAVRDPQTLEILDITPCSFGGVSVITPGTNTSNQVAVLYQDVNCTEVPVAIHADQLTPTWRVYSTGSNVFQTRAGCLIGAEHVNNSYECDIPIGAGICASYQTQTNSPGSASSVASQSIIAYTMSLGAENSVAYSNNSIAIPTNFTISVTTEILPVSMTKTSVDCTMYICGDSTECSNLLLQYGSFCTQLNRALTGIAVEQDKNTQEVFAQVKQIYKTPPIKDFGGFNFSQILPDPSKPSKRSFIEDLLFNKVTLADAGFIKQYGDCLGDIAARDLICAQKFNGLTVLPPLLTDEMIAQYTSALLAGTITSGWTFGAGAALQIPFAMQMAYRFNGIGVTQNVLYENQKLIANQFNSAIGKIQDSLSSTASALGKLQDVVNQNAQALNTLVKQLSSNFGAISSVLNDILSRLDPPEAEVQIDRLITGRLQSLQTYVTQQLIRAAEIRASANLAATKMSECVLGQSKRVDFCGKGYHLMSFPQSAPHGVVFLHVTYVPAQEKNFTTAPAICHDGKAHFPREGVFVSNGTHWFVTQRNFYEPQIITTDNTFVSGNCDVVIGIVNNTVYDPLQSELDSIKEELDKIHKNGSGGSGDIIKLLNEQVNKEMQSSNLYMSMSSWCYTHSLDGAGLFLFDHAAEEYEHAKKLIIFLNENNVPVQLTSISAPEHKFEGLTQIFQKAYEHEQHISESINNIVDHAIKSKDHATFNFLQWYVAEQHEEEVLFKDILDKIELIGNENHGLYLADQYVKGIAKSRKSGS

SEQ ID NO: 332 - protein, 1725 aa, synthetic construct
TTQECDFTPMLTGTPPPIYNFKRLVFTNCNYNLTKLLSLFQVSEFSCHQVSPSSLATGCYSSLTVDYFAYSTDMSSYLQPGSAGAIVQFNYKQDFSNPTCRVLATVPQNLTTITKPSNYAYLTECYKTSAYGKNYLYNAPGAYTPCLSLASRGFSTKYQSHSDGELTTTGYIYPVTGNLQMAFIISVQYGTDTNSVCPMGSGGSGNITNLCPFDEVFNATRFASVYAWNRKRISNCVADYSVLYNFAPFFAFKCYGVSPTKLNDLCFTNVYADSFVIRGNEVSQIAPGQTGNIADYNYKLPDDFTGCVIAWNSNKLDSKVGGNYNYRYRLFRKSNLKPFERDISTEIYQAGNKPCNGVAGVNCYFPLQSYGFRPTYGVGHQPYRVVVLSFELLHAPATVCGPGSGGSGSSQCVNLTTRTQLPPAYTNSFTRGVYYPDKVFRSSVLHSTQDLFLPFFSNVTWFHAIHVSGTNGTKRFDNPVLPFNDGVYFASTEKSNIIRGWIFGTTLDSKTQSLLIVNNATNVVIKVCEFQFCNDPFLGVYYHKNNKSWMESEFRVYSSANNCTFEYVSQPFLMDLEGKQGNFKNLREFVFKNIDGYFKIYSKHTPINLVRDLPQGFSALEPLVDLPIGINITRFQTLLALHRSYLTPGDSSSGWTAGAAAYYVGYLQPRTFLLKYNENGTITDAVDCALDPLSETKCTLKSFTVEKGIYQTSNFRVQPTESIVRFPNITNLCPFGEVFNATKFPSVYAWERKKISNCVADYSVLYNSTFFSTFKCYGVSATKLNDLCFSNVYADSFVVKGDDVRQIAPGQTGVIADYNYKLPDDFMGCVLAWNTRNIDATSTGNYNYKYRYLRHGKLRPFERDISNVPFSPDGKPCTPPALNCYWPLNDYGFYTTTGIGYQPYRVVVLSFELLNAPATVCGPKKSTNLVKNKCVNFNFNGLTGTGVLTESNKKFLPFQQFGRDIADTTDAVRDPQTLEILDITPCSFGGVSVITPGTNTSNQVAVLYQDVNCTEVPVAIHADQLTPTWRVYSTGSNVFQTRAGCLIGAEHVNNSYECDIPIGAGICASYQTQTNSPGSASSVASQSIIAYTMSLGAENSVAYSNNSIAIPTNFTISVTTEILPVSMTKTSVDCTMYICGDSTECSNLLLQYGSFCTQLNRALTGIAVEQDKNTQEVFAQVKQIYKTPPIKDFGGFNFSQILPDPSKPSKRSFIEDLLFNKVTLADAGFIKQYGDCLGDIAARDLICAQKFNGLTVLPPLLTDEMIAQYTSALLAGTITSGWTFGAGAALQIPFAMQMAYRFNGIGVTQNVLYENQKLIANQFNSAIGKIQDSLSSTASALGKLQDVVNQNAQALNTLVKQLSSNFGAISSVLNDILSRLDPPEAEVQIDRLITGRLQSLQTYVTQQLIRAAEIRASANLAATKMSECVLGQSKRVDFCGKGYHLMSFPQSAPHGVVFLHVTYVPAQEKNFTTAPAICHDGKAHFPREGVFVSNGTHWFVTQRNFYEPQIITTDNTFVSGNCDVVIGIVNNTVYDPLQSELDSIKEELDKIHKNGSGGSGDIIKLLNEQVNKEMQSSNLYMSMSSWCYTHSLDGAGLFLFDHAAEEYEHAKKLIIFLNENNVPVQLTSISAPEHKFEGLTQIFQKAYEHEQHISESINNIVDHAIKSKDHATFNFLQWYVAEQHEEEVLFKDILDKIELIGNENHGLYLADQYVKGIAKSRKSGS

SEQ ID NO: 333 - protein, 1315 aa, synthetic construct
SSQCVNLITRTQSYTNSFTRGVYYPDKVFRSSVLHSTQDLFLPFFSNVTWFHAIHVSGTNGTKRFDNPVLPFNDGVYFASTEKSNIIRGWIFGTTLDSKTQSLLIVNNATNVVIKVCEFQFCNDPFLDVYYHKNNKSWMESEFRVYSSANNCTFEYVSQPFLMDLEGKQGNFKNLREFVFKNIDGYFKIYSKHTPINLGRDLPQGFSALEPLVDLPIGINITRFQTLLALHRSYLTPGDSSSGWTAGAAAYYVGYLQPRTFLLKYNENGTITDAVDCALDPLSETKCTLKSFTVEKGIYQTSNFRVQPTESIVRFPNITNLCPFDEVFNATRFASVYAWNRKRISNCVADYSVLYNFAPFFAFKCYGVSPTKLNDLCFTNVYADSFVIRGNEVSQIAPGQTGNIADYNYKLPDDFTGCVIAWNSNKLDSKVGGNYNYLYRLFRKSNLKPFERDISTEIYQAGNKPCNGVAGFNCYFPLRSYGFRPTYGVGHQPYRVVVLSFELLHAPATVCGPKKSTNLVKNKCVNFNFNGLTGTGVLTESNKKFLPFQQFGRDIADTTDAVRDPQTLEILDITPCSFGGVSVITPGTNTSNQVAVLYQGVNCTEVPVAIHADQLTPTWRVYSTGSNVFQTRAGCLIGAEYVNNSYECDIPIGAGICASYQTQTKSHGSASSVASQSIIAYTMSLGAENSVAYSNNSIAIPTNFTISVTTEILPVSMTKTSVDCTMYICGDSTECSNLLLQYGSFCTQLKRALTGIAVEQDKNTQEVFAQVKQIYKTPPIKYFGGFNFSQILPDPSKPSKRSFIEDLLFNKVTLADAGFIKQYGDCLGDIAARDLICAQKFNGLTVLPPLLTDEMIAQYTSALLAGTITSGWTFGAGAALQIPFAMQMAYRFNGIGVTQNVLYENQKLIANQFNSAIGKIQDSLSSTASALGKLQDVVNHNAQALNTLVKQLSSKFGAISSVLNDILSRLDPPEAEVQIDRLITGRLQSLQTYVTQQLIRAAEIRASANLAATKMSECVLGQSKRVDFCGKGYHLMSFPQSAPHGVVFLHVTYVPAQEKNFTTAPAICHDGKAHFPREGVFVSNGTHWFVTQRNFYEPQIITTDNTFVSGNCDVVIGIVNNTVYDPLQSELDSIKEELDKIHKNGSGGSGDIIKLLNEQVNKEMQSSNLYMSMSSWCYTHSLDGAGLFLFDHAAEEYEHAKKLIIFLNENNVPVQLTSISAPEHKFEGLTQIFQKAYEHEQHISESINNIVDHAIKSKDHATFNFLQWYVAEQHEEEVLFKDILDKIELIGNENHGLYLADQYVKGIAKSRKSGS

SEQ ID NO: 334 - protein, 1313 aa, synthetic construct
SSQCVNLITRTQSYTNSFTRGVYYPDKVFRSSVLHSTQDLFLPFFSNVTWFHAISGTNGTKRFDNPVLPFNDGVYFASTEKSNIIRGWIFGTTLDSKTQSLLIVNNATNVVIKVCEFQFCNDPFLDVYYHKNNKSWMESEFRVYSSANNCTFEYVSQPFLMDLEGKQGNFKNLREFVFKNIDGYFKIYSKHTPINLGRDLPQGFSALEPLVDLPIGINITRFQTLLALHRSYLTPGDSSSGWTAGAAAYYVGYLQPRTFLLKYNENGTITDAVDCALDPLSETKCTLKSFTVEKGIYQTSNFRVQPTESIVRFPNITNLCPFDEVFNATRFASVYAWNRKRISNCVADYSVLYNFAPFFAFKCYGVSPTKLNDLCFTNVYADSFVIRGNEVSQIAPGQTGNIADYNYKLPDDFTGCVIAWNSNKLDSKVGGNYNYRYRLFRKSNLKPFERDISTEIYQAGNKPCNGVAGVNCYFPLQSYGFRPTYGVGHQPYRVVVLSFELLHAPATVCGPKKSTNLVKNKCVNFNFNGLTGTGVLTESNKKFLPFQQFGRDIADTTDAVRDPQTLEILDITPCSFGGVSVITPGTNTSNQVAVLYQGVNCTEVPVAIHADQLTPTWRVYSTGSNVFQTRAGCLIGAEYVNNSYECDIPIGAGICASYQTQTKSHGSASSVASQSIIAYTMSLGAENSVAYSNNSIAIPTNFTISVTTEILPVSMTKTSVDCTMYICGDSTECSNLLLQYGSFCTQLKRALTGIAVEQDKNTQEVFAQVKQIYKTPPIKYFGGFNFSQILPDPSKPSKRSFIEDLLFNKVTLADAGFIKQYGDCLGDIAARDLICAQKFNGLTVLPPLLTDEMIAQYTSALLAGTITSGWTFGAGAALQIPFAMQMAYRFNGIGVTQNVLYENQKLIANQFNSAIGKIQDSLSSTASALGKLQDVVNHNAQALNTLVKQLSSKFGAISSVLNDILSRLDPPEAEVQIDRLITGRLQSLQTYVTQQLIRAAEIRASANLAATKMSECVLGQSKRVDFCGKGYHLMSFPQSAPHGVVFLHVTYVPAQEKNFTTAPAICHDGKAHFPREGVFVSNGTHWFVTQRNFYEPQIITTDNTFVSGNCDVVIGIVNNTVYDPLQSELDSIKEELDKIHKNGSGGSGDIIKLLNEQVNKEMQSSNLYMSMSSWCYTHSLDGAGLFLFDHAAEEYEHAKKLIIFLNENNVPVQLTSISAPEHKFEGLTQIFQKAYEHEQHISESINNIVDHAIKSKDHATFNFLQWYVAEQHEEEVLFKDILDKIELIGNENHGLYLADQYVKGIAKSRKSGS

SEQ ID NO: 335 - protein, 599 aa, synthetic construct
HHHHHHHHGPLEVLFQGPNITNLCPFDEVFNATRFASVYAWNRKRISNCVADYSVLYNFAPFFAFKCYGVSPTKLNDLCFTNVYADSFVIRGNEVSQIAPGQTGNIADYNYKLPDDFTGCVIAWNSNKLDSKVGGNYNYRYRLFRKSNLKPFERDISTEIYQAGNKPCNGVAGVNCYFPLQSYGFRPTYGVGHQPYRVVVLSFELLHAPATVCGPGSGGSGNITNLCPFGEVFNATRFASVYAWNRKRISNCVADYSVLYNSASFSTFKCYGVSPTKLNDLCFTNVYADSFVIRGDEVRQIAPGQTGKIADYNYKLPDDFTGCVIAWNSNNLDSKVGGNYNYLRRLFRKSNLKPFERDISTEIYQAGSTPCNGVEGFNCYFPLQSYGFQPTNGVGYQPYRVVVLSFENKSAPATVCGPGSGGGGESQVRQQFSKDIEKLLNEQVNKEMQSSNLYMSMSSWCYTHSLDGAGLFLFDHAAEEYEHAKKLIIFLNENNVPVQLTSISAPEHKFEGLTQIFQKAYEHEQHISESINNIVDHAIKSKDHATFNFLQWYVAEQHEEEVLFKDILDKIELIGNENHGLYLADQYVKGIAKSRKSGS

SEQ ID NO: 336 - protein, 599 aa, synthetic construct
HHHHHHHHGPLEVLFQGPNITNLCPFDEVFNATRFASVYAWNRKRISNCVADYSVLYNFAPFFAFKCYGVSPTKLNDLCFTNVYADSFVIRGNEVSQIAPGQTGNIADYNYKLPDDFTGCVIAWNSNKLDSKVGGNYNYQYRLFRKSNLKPFERDISTEIYQAGNKPCNGVAGFNCYFPLRSYGFRPTYGVGHQPYRVVVLSFELLHAPATVCGPGSGGSGNITNLCPFGEVFNATRFASVYAWNRKRISNCVADYSVLYNSASFSTFKCYGVSPTKLNDLCFTNVYADSFVIRGDEVRQIAPGQTGKIADYNYKLPDDFTGCVIAWNSNNLDSKVGGNYNYLRRLFRKSNLKPFERDISTEIYQAGSTPCNGVEGFNCYFPLQSYGFQPTNGVGYQPYRVVVLSFENKSAPATVCGPGSGGGGESQVRQQFSKDIEKLLNEQVNKEMQSSNLYMSMSSWCYTHSLDGAGLFLFDHAAEEYEHAKKLIIFLNENNVPVQLTSISAPEHKFEGLTQIFQKAYEHEQHISESINNIVDHAIKSKDHATFNFLQWYVAEQHEEEVLFKDILDKIELIGNENHGLYLADQYVKGIAKSRKSGS

SEQ ID NO: 337 - protein, 595 aa, synthetic construct
HHHHHHHHGPLEVLFQGPNITQLCPFNEVFNITSFPSVYAWERMRITNCVADYSVLYNSSASFSTFQCYGVSPTKLNDLCFSSVYADYFVVKGDDVRQIAPAQTGVIADYNYKLPDDFTGCVIAWNTNSLDSSNEFFYRRFRHGKIKPYGRDLSNVLFNPSGGTCSAEGLNCYKPLASYGFTQSSGIGFQPYRVVVLSFELLNAPATVCGPGSGGSGNITNLCPFGEVFNATRFASVYAWNRKRISNCVADYSVLYNSASFSTFKCYGVSPTKLNDLCFTNVYADSFVIRGDEVRQIAPGQTGKIADYNYKLPDDFTGCVIAWNSNNLDSKVGGNYNYLRRLFRKSNLKPFERDISTEIYQAGSTPCNGVEGFNCYFPLQSYGFQPTNGVGYQPYRVVVLSFENKSAPATVCGPGSGGGGESQVRQQFSKDIEKLLNEQVNKEMQSSNLYMSMSSWCYTHSLDGAGLFLFDHAAEEYEHAKKLIIFLNENNVPVQLTSISAPEHKFEGLTQIFQKAYEHEQHISESINNIVDHAIKSKDHATFNFLQWYVAEQHEEEVLFKDILDKIELIGNENHGLYLADQYVKGIAKSRKSGS

SEQ ID NO: 338 - protein, 595 aa, synthetic construct
HHHHHHHHGPLEVLFQGPNITQLCPFNEVFNITSFPSVYAWERMRITNCVADYSVLYNSSASFSTFQCYGVSPTKLNDLCFSSVYADYFVVKGDDVRQIAPAQTGVIADYNYKLPDDFTGCVIAWNTNSLDSSNEFFYRRFRHGKIKPYGRDLSNVLFNPSGGTCSAEGLNCYKPLASYGFWQSSGIGFQPYRVVVLSFELLNAPATVCGPGSGGSGNITNLCPFGEVFNATRFASVYAWNRKRISNCVADYSVLYNSASFSTFKCYGVSPTKLNDLCFTNVYADSFVIRGDEVRQIAPGQTGKIADYNYKLPDDFTGCVIAWNSNNLDSKVGGNYNYLRRLFRKSNLKPFERDISTEIYQAGSTPCNGVEGFNCYFPLQSYGFQPTNGVGYQPYRVVVLSFENKSAPATVCGPGSGGGGESQVRQQFSKDIEKLLNEQVNKEMQSSNLYMSMSSWCYTHSLDGAGLFLFDHAAEEYEHAKKLIIFLNENNVPVQLTSISAPEHKFEGLTQIFQKAYEHEQHISESINNIVDHAIKSKDHATFNFLQWYVAEQHEEEVLFKDILDKIELIGNENHGLYLADQYVKGIAKSRKSGS

SEQ ID NO: 339 - protein, 595 aa, synthetic construct
HHHHHHHHGPLEVLFQGPNITQLCPFNEVFNITSFPSVYAWERMRITNCVADYSVLYNSSASFSTFQCYGVSPTKLNDLCFSSVYADYFVVKGDDVRQIAPAQTGVIADYNYKLPDDFTGCVIAWNTNSLDSSNEFFYRRFRHGKIKPYGRDLSNVLFNPSGGTCSAEGLNCYKPLYSYGFWQSSGIGFQPYRVVVLSFELLNAPATVCGPGSGGSGNITNLCPFGEVFNATRFASVYAWNRKRISNCVADYSVLYNSASFSTFKCYGVSPTKLNDLCFTNVYADSFVIRGDEVRQIAPGQTGKIADYNYKLPDDFTGCVIAWNSNNLDSKVGGNYNYLRRLFRKSNLKPFERDISTEIYQAGSTPCNGVEGFNCYFPLQSYGFQPTNGVGYQPYRVVVLSFENKSAPATVCGPGSGGGGESQVRQQFSKDIEKLLNEQVNKEMQSSNLYMSMSSWCYTHSLDGAGLFLFDHAAEEYEHAKKLIIFLNENNVPVQLTSISAPEHKFEGLTQIFQKAYEHEQHISESINNIVDHAIKSKDHATFNFLQWYVAEQHEEEVLFKDILDKIELIGNENHGLYLADQYVKGIAKSRKSGS

SEQ ID NO: 340 - protein, 598 aa, synthetic construct
HHHHHHHHGPLEVLFQGPNITNLCPFGEVFNATTFPSVYAWERKRISNCVADYSVLYNSTSFSTFKCYGVSATKLNDLCFSNVYADSFVVKGDDVRQIAPGQTGVIADYNYKLPDDFLGCVLAWNTNSKDSSTSGNYNYLYRWVRRSKLNPYERDLSNDIYSPGGQSCSAVGPNCYNPLRPYGFFTTAGVGHQPYRVVVLSFELLNAPATVCGPGSGGSGNITNLCPFGEVFNATRFASVYAWNRKRISNCVADYSVLYNSASFSTFKCYGVSPTKLNDLCFTNVYADSFVIRGDEVRQIAPGQTGKIADYNYKLPDDFTGCVIAWNSNNLDSKVGGNYNYLRRLFRKSNLKPFERDISTEIYQAGSTPCNGVEGFNCYFPLQSYGFQPTNGVGYQPYRVVVLSFENKSAPATVCGPGSGGGGESQVRQQFSKDIEKLLNEQVNKEMQSSNLYMSMSSWCYTHSLDGAGLFLFDHAAEEYEHAKKLIIFLNENNVPVQLTSISAPEHKFEGLTQIFQKAYEHEQHISESINNIVDHAIKSKDHATFNFLQWYVAEQHEEEVLFKDILDKIELIGNENHGLYLADQYVKGIAKSRKSGS

SEQ ID NO: 341 - protein, 598 aa, synthetic construct
HHHHHHHHGPLEVLFQGPNITNLCPFGEVFNATTFPSVYAWERKRISNCVADYSVLYNSTSFSTFKCYGVSATKLNDLCFSNVYADSFVVKGDDVRQIAPGQTGVIADYNYKLPDDFTGCVLAWNTRNIDATQTGNYNYKYRSLRHGKLRPFERDISNVPFSPDGKPCTPPAFNCYWPLNDYGFYITNGIGYQPYRVVVLSFELLNAPATVCGPGSGGSGNITNLCPFGEVFNATRFASVYAWNRKRISNCVADYSVLYNSASFSTFKCYGVSPTKLNDLCFTNVYADSFVIRGDEVRQIAPGQTGKIADYNYKLPDDFTGCVIAWNSNNLDSKVGGNYNYLRRLFRKSNLKPFERDISTEIYQAGSTPCNGVEGFNCYFPLQSYGFQPTNGVGYQPYRVVVLSFENKSAPATVCGPGSGGGGESQVRQQFSKDIEKLLNEQVNKEMQSSNLYMSMSSWCYTHSLDGAGLFLFDHAAEEYEHAKKLIIFLNENNVPVQLTSISAPEHKFEGLTQIFQKAYEHEQHISESINNIVDHAIKSKDHATFNFLQWYVAEQHEEEVLFKDILDKIELIGNENHGLYLADQYVKGIAKSRKSGS

SEQ ID NO: 342 - protein, 580 aa, synthetic construct
HHHHHHHHGPLEVLFQGPNITNVCPFHKVFNATRFPSVYAWERTKISDCIADYTVFYNSTSFSTFKCYGVSPSKLIDLCFTSVYADTFLIRFSEVRQVAPGQTGVIADYNYKLPDDFTGCVIAWNTAKQDTGHYFYRSHRSTKLKPFERDLSSDENGVRTLSTYDFNPNVPLEYQATRVVVLSFELLNAPATVCGPGSGGSGNITNLCPFGEVFNATRFASVYAWNRKRISNCVADYSVLYNSASFSTFKCYGVSPTKLNDLCFTNVYADSFVIRGDEVRQIAPGQTGKIADYNYKLPDDFTGCVIAWNSNNLDSKVGGNYNYLRRLFRKSNLKPFERDISTEIYQAGSTPCNGVEGFNCYFPLQSYGFQPTNGVGYQPYRVVVLSFENKSAPATVCGPGSGGGGESQVRQQFSKDIEKLLNEQVNKEMQSSNLYMSMSSWCYTHSLDGAGLFLFDHAAEEYEHAKKLIIFLNENNVPVQLTSISAPEHKFEGLTQIFQKAYEHEQHISESINNIVDHAIKSKDHATFNFLQWYVAEQHEEEVLFKDILDKIELIGNENHGLYLADQYVKGIAKSRKSGS

SEQ ID NO: 343 - protein, 599 aa, synthetic construct
HHHHHHHHGPLEVLFQGPNITNLCPFGEVFNATTFASVYAWNRKRISNCVADYSVLYNSTSFSTFKCYGVSPTKLNDLCFTNVYADSFVVRGDEVRQIAPGQTGKIADYNYKLPDDFTGCVIAWNSNNLDSKVGGNYNYLYRLFRKSNLKPFERDISTEIYQAGSTPCNGVEGFNCYFPLQSYGFHPTNGVGYQPYRVVVLSFELLNAPATVCGPGSGGSGNITNLCPFGEVFNATRFASVYAWNRKRISNCVADYSVLYNSASFSTFKCYGVSPTKLNDLCFTNVYADSFVIRGDEVRQIAPGQTGKIADYNYKLPDDFTGCVIAWNSNNLDSKVGGNYNYLRRLFRKSNLKPFERDISTEIYQAGSTPCNGVEGFNCYFPLQSYGFQPTNGVGYQPYRVVVLSFENKSAPATVCGPGSGGGGESQVRQQFSKDIEKLLNEQVNKEMQSSNLYMSMSSWCYTHSLDGAGLFLFDHAAEEYEHAKKLIIFLNENNVPVQLTSISAPEHKFEGLTQIFQKAYEHEQHISESINNIVDHAIKSKDHATFNFLQWYVAEQHEEEVLFKDILDKIELIGNENHGLYLADQYVKGIAKSRKSGS

SEQ ID NO: 344 - protein, 599 aa, synthetic construct
HHHHHHHHGPLEVLFQGPNITNLCPFGEVFNATTFASVYAWNRKRISNCVADYSVLYNSTSFSTFKCYGVSPTKLNDLCFTNVYADSFVITGDEVRQIAPGQTGKIADYNYKLPDDFTGCVIAWNSKHIDAKEGGNFNYLYRLFRKANLKPFERDISTEIYQAGSKPCNGQTGLNCYYPLYRYGFYPTDGVGHQPYRVVVLSFELLNAPATVCGPGSGGSGNITNLCPFGEVFNATRFASVYAWNRKRISNCVADYSVLYNSASFSTFKCYGVSPTKLNDLCFTNVYADSFVIRGDEVRQIAPGQTGKIADYNYKLPDDFTGCVIAWNSNNLDSKVGGNYNYLRRLFRKSNLKPFERDISTEIYQAGSTPCNGVEGFNCYFPLQSYGFQPTNGVGYQPYRVVVLSFENKSAPATVCGPGSGGGGESQVRQQFSKDIEKLLNEQVNKEMQSSNLYMSMSSWCYTHSLDGAGLFLFDHAAEEYEHAKKLIIFLNENNVPVQLTSISAPEHKFEGLTQIFQKAYEHEQHISESINNIVDHAIKSKDHATFNFLQWYVAEQHEEEVLFKDILDKIELIGNENHGLYLADQYVKGIAKSRKSGS

SEQ ID NO: 345 - protein, 580 aa, synthetic construct
HHHHHHHHGPLEVLFQGPNITNFCPFDKVFNATRFPNVYAWQRTKISDCIADYTVLYNSTSFSTFKCYGVSPSKLIDLCFTSVYADTFLIRFSEVRQIAPGETGVIADYNYKLPDDFTGCVLAWNTAQQDIGSYFYRSHRAVKLKPFERDLSSDENGVRTLSTYDFNPNVPLDYQATRVVVLSFELLNAPATVCGPGSGGSGNITNLCPFGEVFNATRFASVYAWNRKRISNCVADYSVLYNSASFSTFKCYGVSPTKLNDLCFTNVYADSFVIRGDEVRQIAPGQTGKIADYNYKLPDDFTGCVIAWNSNNLDSKVGGNYNYLRRLFRKSNLKPFERDISTEIYQAGSTPCNGVEGFNCYFPLQSYGFQPTNGVGYQPYRVVVLSFENKSAPATVCGPGSGGGGESQVRQQFSKDIEKLLNEQVNKEMQSSNLYMSMSSWCYTHSLDGAGLFLFDHAAEEYEHAKKLIIFLNENNVPVQLTSISAPEHKFEGLTQIFQKAYEHEQHISESINNIVDHAIKSKDHATFNFLQWYVAEQHEEEVLFKDILDKIELIGNENHGLYLADQYVKGIAKSRKSGS

SEQ ID NO: 346 - protein, 580 aa, synthetic construct
HHHHHHHHGPLEVLFQGPNITNFCPFDKVFNATRFPNVYAWQRTKISDCIADYTVLYNSTSFSTFKCYGVSPSKLIDLCFTSVYADTFLIRFSEVRQIAPGETGVIADYNYKLPDDFTGCVLAWNTAQQDIGSYFYRSHRAVKLKPFERDLSSDENGVRTLSTYDFWPNVPLDYQATRVVVLSFELLNAPATVCGPGSGGSGNITNLCPFGEVFNATRFASVYAWNRKRISNCVADYSVLYNSASFSTFKCYGVSPTKLNDLCFTNVYADSFVIRGDEVRQIAPGQTGKIADYNYKLPDDFTGCVIAWNSNNLDSKVGGNYNYLRRLFRKSNLKPFERDISTEIYQAGSTPCNGVEGFNCYFPLQSYGFQPTNGVGYQPYRVVVLSFENKSAPATVCGPGSGGGGESQVRQQFSKDIEKLLNEQVNKEMQSSNLYMSMSSWCYTHSLDGAGLFLFDHAAEEYEHAKKLIIFLNENNVPVQLTSISAPEHKFEGLTQIFQKAYEHEQHISESINNIVDHAIKSKDHATFNFLQWYVAEQHEEEVLFKDILDKIELIGNENHGLYLADQYVKGIAKSRKSGS

SEQ ID NO: 347 - protein, 580 aa, synthetic construct
HHHHHHHHGPLEVLFQGPNITNFCPFDKVFNATRFPNVYAWQRTKISDCIADYTVLYNSTSFSTFKCYGVSPSKLIDLCFTSVYADTFLIRFSEVRQIAPGETGVIADYNYKLPDDFTGCVLAWNTAQQDIGSYFYRSHRAVKLKPFERDLSSDENGVRTLYTYDFWPNVPLDYQATRVVVLSFELLNAPATVCGPGSGGSGNITNLCPFGEVFNATRFASVYAWNRKRISNCVADYSVLYNSASFSTFKCYGVSPTKLNDLCFTNVYADSFVIRGDEVRQIAPGQTGKIADYNYKLPDDFTGCVIAWNSNNLDSKVGGNYNYLRRLFRKSNLKPFERDISTEIYQAGSTPCNGVEGFNCYFPLQSYGFQPTNGVGYQPYRVVVLSFENKSAPATVCGPGSGGGGESQVRQQFSKDIEKLLNEQVNKEMQSSNLYMSMSSWCYTHSLDGAGLFLFDHAAEEYEHAKKLIIFLNENNVPVQLTSISAPEHKFEGLTQIFQKAYEHEQHISESINNIVDHAIKSKDHATFNFLQWYVAEQHEEEVLFKDILDKIELIGNENHGLYLADQYVKGIAKSRKSGS

SEQ ID NO: 348 - protein, 580 aa, synthetic construct
HHHHHHHHGPLEVLFQGPNITNLCPFDAVFNATRFPSVYAWERVKISNCVADYTAFYNSTSFSTFKCYGVSPSKLIDLCFTSVYADTFLIRFSEVRQVAPGETGVIADYNYKLPDDFTGCVIAWNTAKQDVGSYFYRSHRSSKLKPFERDLSSDENGVRTLSTYDFNPNVPLDYQATRVVVLSFELLNAPATVCGPGSGGSGNITNLCPFGEVFNATRFASVYAWNRKRISNCVADYSVLYNSASFSTFKCYGVSPTKLNDLCFTNVYADSFVIRGDEVRQIAPGQTGKIADYNYKLPDDFTGCVIAWNSNNLDSKVGGNYNYLRRLFRKSNLKPFERDISTEIYQAGSTPCNGVEGFNCYFPLQSYGFQPTNGVGYQPYRVVVLSFENKSAPATVCGPGSGGGGESQVRQQFSKDIEKLLNEQVNKEMQSSNLYMSMSSWCYTHSLDGAGLFLFDHAAEEYEHAKKLIIFLNENNVPVQLTSISAPEHKFEGLTQIFQKAYEHEQHISESINNIVDHAIKSKDHATFNFLQWYVAEQHEEEVLFKDILDKIELIGNENHGLYLADQYVKGIAKSRKSGS

SEQ ID NO: 349 - protein, 580 aa, synthetic construct
HHHHHHHHGPLEVLFQGPNITNRCPFDKVFNATRFPSVYAWERTKISDCVADYTVLYNSTSFSTFKCYGVSPSKLIDLCFTSVYADTFLIRSSEVRQVAPGETGVIADYNYKLPDDFTGCVIAWNTANQDQGQYYYRSSRKEKLKPFERDLSSDENGVYTLSTYDFYPSVPLDYQATRVVVLSFELLNAPATVCGPGSGGSGNITNLCPFGEVFNATRFASVYAWNRKRISNCVADYSVLYNSASFSTFKCYGVSPTKLNDLCFTNVYADSFVIRGDEVRQIAPGQTGKIADYNYKLPDDFTGCVIAWNSNNLDSKVGGNYNYLRRLFRKSNLKPFERDISTEIYQAGSTPCNGVEGFNCYFPLQSYGFQPTNGVGYQPYRVVVLSFENKSAPATVCGPGSGGGGESQVRQQFSKDIEKLLNEQVNKEMQSSNLYMSMSSWCYTHSLDGAGLFLFDHAAEEYEHAKKLIIFLNENNVPVQLTSISAPEHKFEGLTQIFQKAYEHEQHISESINNIVDHAIKSKDHATFNFLQWYVAEQHEEEVLFKDILDKIELIGNENHGLYLADQYVKGIAKSRKSGS

SEQ ID NO: 350 - protein, 580 aa, synthetic construct
HHHHHHHHGPLEVLFQGPNITNLCPFDKVFNATRFPSVYAWERTKISDCVADYTVFYNSTSFSTFNCYGVSPSKLIDLCFTSVYADTFLIRFSEVRQVAPGQTGVIADYNYKLPDDFTGCVIAWNTAKQDVGSYFYRSHRSSKLKPFERDLSSEENGVRTLSTYDFNQYVPLEYQATRVVVLSFELLNAPATVCGPGSGGSGNITNLCPFGEVFNATRFASVYAWNRKRISNCVADYSVLYNSASFSTFKCYGVSPTKLNDLCFTNVYADSFVIRGDEVRQIAPGQTGKIADYNYKLPDDFTGCVIAWNSNNLDSKVGGNYNYLRRLFRKSNLKPFERDISTEIYQAGSTPCNGVEGFNCYFPLQSYGFQPTNGVGYQPYRVVVLSFENKSAPATVCGPGSGGGGESQVRQQFSKDIEKLLNEQVNKEMQSSNLYMSMSSWCYTHSLDGAGLFLFDHAAEEYEHAKKLIIFLNENNVPVQLTSISAPEHKFEGLTQIFQKAYEHEQHISESINNIVDHAIKSKDHATFNFLQWYVAEQHEEEVLFKDILDKIELIGNENHGLYLADQYVKGIAKSRKSGS

SEQ ID NO: 351 - protein, 580 aa, synthetic construct
HHHHHHHHGPLEVLFQGPNITNRCPFDKVFNATRFPNVYAWERTKISDCVADYTVLYNSTSFSTFKCYGVSPSKLIDLCFTSVYADTFLIRSSEVRQVAPGETGVIADYNYKLPDDFTGCVIAWNTAKQDQGQYYYRSHRKTKLKPFERDLSSDENGVRTLSTYDFYPSVPVAYQATRVVVLSFELLNAPATVCGPGSGGSGNITNLCPFGEVFNATRFASVYAWNRKRISNCVADYSVLYNSASFSTFKCYGVSPTKLNDLCFTNVYADSFVIRGDEVRQIAPGQTGKIADYNYKLPDDFTGCVIAWNSNNLDSKVGGNYNYLRRLFRKSNLKPFERDISTEIYQAGSTPCNGVEGFNCYFPLQSYGFQPTNGVGYQPYRVVVLSFENKSAPATVCGPGSGGGGESQVRQQFSKDIEKLLNEQVNKEMQSSNLYMSMSSWCYTHSLDGAGLFLFDHAAEEYEHAKKLIIFLNENNVPVQLTSISAPEHKFEGLTQIFQKAYEHEQHISESINNIVDHAIKSKDHATFNFLQWYVAEQHEEEVLFKDILDKIELIGNENHGLYLADQYVKGIAKSRKSGS

SEQ ID NO: 352 - protein, 580 aa, synthetic construct
HHHHHHHHGPLEVLFQGPNITNRCPFDKVFNASRFPNVYAWERTKISDCVADYTVLYNSTSFSTFKCYGVSPSKLIDLCFTSVYADTFLIRSSEVRQVAPGETGVIADYNYKLPDDFTGCVIAWNTAKQDQGQYYYRSSRKTKLKPFERDLTSDENGVRTLSTYDFYPNVPIEYQATRVVVLSFELLNAPATVCGPGSGGSGNITNLCPFGEVFNATRFASVYAWNRKRISNCVADYSVLYNSASFSTFKCYGVSPTKLNDLCFTNVYADSFVIRGDEVRQIAPGQTGKIADYNYKLPDDFTGCVIAWNSNNLDSKVGGNYNYLRRLFRKSNLKPFERDISTEIYQAGSTPCNGVEGFNCYFPLQSYGFQPTNGVGYQPYRVVVLSFENKSAPATVCGPGSGGGGESQVRQQFSKDIEKLLNEQVNKEMQSSNLYMSMSSWCYTHSLDGAGLFLFDHAAEEYEHAKKLIIFLNENNVPVQLTSISAPEHKFEGLTQIFQKAYEHEQHISESINNIVDHAIKSKDHATFNFLQWYVAEQHEEEVLFKDILDKIELIGNENHGLYLADQYVKGIAKSRKSGS

SEQ ID NO: 353 - protein, 595 aa, synthetic construct
HHHHHHHHGPLEVLFQGPNITNLCPFSQVFNATRFPSVYAWTRERISNCIADYSVLYNSTSFSTFRCYGVSPTKLNDLCFSNVYADSMVVRGDEVRQIAPSQTGVIADYNYKLPDDFTGCVIAWNSKAKDENGQYFYRLFRKSKLLPFQRDVSNVTYGSGKNDGCNPSEADCYWPLLKYGFTSSVSQDYQPYRVVVLSFELLNAPATVCGPGSGGSGNITNLCPFGEVFNATRFASVYAWNRKRISNCVADYSVLYNSASFSTFKCYGVSPTKLNDLCFTNVYADSFVIRGDEVRQIAPGQTGKIADYNYKLPDDFTGCVIAWNSNNLDSKVGGNYNYLRRLFRKSNLKPFERDISTEIYQAGSTPCNGVEGFNCYFPLQSYGFQPTNGVGYQPYRVVVLSFENKSAPATVCGPGSGGGGESQVRQQFSKDIEKLLNEQVNKEMQSSNLYMSMSSWCYTHSLDGAGLFLFDHAAEEYEHAKKLIIFLNENNVPVQLTSISAPEHKFEGLTQIFQKAYEHEQHISESINNIVDHAIKSKDHATFNFLQWYVAEQHEEEVLFKDILDKIELIGNENHGLYLADQYVKGIAKSRKSGS

SEQ ID NO: 354 - protein, 595 aa, synthetic construct
HHHHHHHHGPLEVLFQGPNITNLCPFSQVFNATRFPSVYAWTRERISNCIADYSVLYNSTSFSTFRCYGVSPTKLNDLCFSNVYADSMVVRGDEVRQIAPSQTGVIADYNYKLPDDFTGCVIAWNSKAKDENGQYFYRLFRKSKLLPFQRDVSNVTYGSGKNDGCNPSEADCYWPLLKYGFWSSVSQDYQPYRVVVLSFELLNAPATVCGPGSGGSGNITNLCPFGEVFNATRFASVYAWNRKRISNCVADYSVLYNSASFSTFKCYGVSPTKLNDLCFTNVYADSFVIRGDEVRQIAPGQTGKIADYNYKLPDDFTGCVIAWNSNNLDSKVGGNYNYLRRLFRKSNLKPFERDISTEIYQAGSTPCNGVEGFNCYFPLQSYGFQPTNGVGYQPYRVVVLSFENKSAPATVCGPGSGGGGESQVRQQFSKDIEKLLNEQVNKEMQSSNLYMSMSSWCYTHSLDGAGLFLFDHAAEEYEHAKKLIIFLNENNVPVQLTSISAPEHKFEGLTQIFQKAYEHEQHISESINNIVDHAIKSKDHATFNFLQWYVAEQHEEEVLFKDILDKIELIGNENHGLYLADQYVKGIAKSRKSGS

SEQ ID NO: 355 - protein, 595 aa, synthetic construct
HHHHHHHHGPLEVLFQGPNITNLCPFSQVFNATRFPSVYAWTRERISNCIADYSVLYNSTSFSTFRCYGVSPTKLNDLCFSNVYADSMVVRGDEVRQIAPSQTGVIADYNYKLPDDFTGCVIAWNSKAKDENGQYFYRLFRKSKLLPFQRDVSNVTYGSGKNDGCNPSEADCYWPLYKYGFWSSVSQDYQPYRVVVLSFELLNAPATVCGPGSGGSGNITNLCPFGEVFNATRFASVYAWNRKRISNCVADYSVLYNSASFSTFKCYGVSPTKLNDLCFTNVYADSFVIRGDEVRQIAPGQTGKIADYNYKLPDDFTGCVIAWNSNNLDSKVGGNYNYLRRLFRKSNLKPFERDISTEIYQAGSTPCNGVEGFNCYFPLQSYGFQPTNGVGYQPYRVVVLSFENKSAPATVCGPGSGGGGESQVRQQFSKDIEKLLNEQVNKEMQSSNLYMSMSSWCYTHSLDGAGLFLFDHAAEEYEHAKKLIIFLNENNVPVQLTSISAPEHKFEGLTQIFQKAYEHEQHISESINNIVDHAIKSKDHATFNFLQWYVAEQHEEEVLFKDILDKIELIGNENHGLYLADQYVKGIAKSRKSGS

SEQ ID NO: 356 - protein, 596 aa, synthetic construct
HHHHHHHHGPLEVLFQGPNMTNICPFDQVFNKTQFPSVYAWERVRISDCVSDYTVLYNSSASFSTFKCYGVSPTKLNDLCFSGVYADYFVVKGDHVHQIAPGQTGVIADYNYKLPSEFVGCILAWNTRTIDSKRGFYYRLFRHGNIRPYERDTSNVPYNAAGGTCNQPGTHNCYEPLQDYGFTSTSGVGYQPFRVVVLSFELLNAPATVCGPGSGGSGNITNLCPFGEVFNATRFASVYAWNRKRISNCVADYSVLYNSASFSTFKCYGVSPTKLNDLCFTNVYADSFVIRGDEVRQIAPGQTGKIADYNYKLPDDFTGCVIAWNSNNLDSKVGGNYNYLRRLFRKSNLKPFERDISTEIYQAGSTPCNGVEGFNCYFPLQSYGFQPTNGVGYQPYRVVVLSFENKSAPATVCGPGSGGGGESQVRQQFSKDIEKLLNEQVNKEMQSSNLYMSMSSWCYTHSLDGAGLFLFDHAAEEYEHAKKLIIFLNENNVPVQLTSISAPEHKFEGLTQIFQKAYEHEQHISESINNIVDHAIKSKDHATFNFLQWYVAEQHEEEVLFKDILDKIELIGNENHGLYLADQYVKGIAKSRKSGS

SEQ ID NO: 357 - protein, 596 aa, synthetic construct
HHHHHHHHGPLEVLFQGPNMTNICPFDQVFNKTQFPSVYAWERVRISDCVSDYTVLYNSSASFSTFKCYGVSPTKLNDLCFSGVYADYFVVKGDHVHQIAPGQTGVIADYNYKLPSEFVGCILAWNTRTIDSKRGFYYRLFRHGNIRPYERDTSNVPYNAAGGTCNQPGTHNCYEPLQDYGFWSTSGVGYQPFRVVVLSFELLNAPATVCGPGSGGSGNITNLCPFGEVFNATRFASVYAWNRKRISNCVADYSVLYNSASFSTFKCYGVSPTKLNDLCFTNVYADSFVIRGDEVRQIAPGQTGKIADYNYKLPDDFTGCVIAWNSNNLDSKVGGNYNYLRRLFRKSNLKPFERDISTEIYQAGSTPCNGVEGFNCYFPLQSYGFQPTNGVGYQPYRVVVLSFENKSAPATVCGPGSGGGGESQVRQQFSKDIEKLLNEQVNKEMQSSNLYMSMSSWCYTHSLDGAGLFLFDHAAEEYEHAKKLIIFLNENNVPVQLTSISAPEHKFEGLTQIFQKAYEHEQHISESINNIVDHAIKSKDHATFNFLQWYVAEQHEEEVLFKDILDKIELIGNENHGLYLADQYVKGIAKSRKSGS

SEQ ID NO: 358 - protein, 596 aa, synthetic construct
HHHHHHHHGPLEVLFQGPNMTNICPFDQVFNKTQFPSVYAWERVRISDCVSDYTVLYNSSASFSTFKCYGVSPTKLNDLCFSGVYADYFVVKGDHVHQIAPGQTGVIADYNYKLPSEFVGCILAWNTRTIDSKRGFYYRLFRHGNIRPYERDTSNVPYNAAGGTCNQPGTHNCYEPLYDYGFWSTSGVGYQPFRVVVLSFELLNAPATVCGPGSGGSGNITNLCPFGEVFNATRFASVYAWNRKRISNCVADYSVLYNSASFSTFKCYGVSPTKLNDLCFTNVYADSFVIRGDEVRQIAPGQTGKIADYNYKLPDDFTGCVIAWNSNNLDSKVGGNYNYLRRLFRKSNLKPFERDISTEIYQAGSTPCNGVEGFNCYFPLQSYGFQPTNGVGYQPYRVVVLSFENKSAPATVCGPGSGGGGESQVRQQFSKDIEKLLNEQVNKEMQSSNLYMSMSSWCYTHSLDGAGLFLFDHAAEEYEHAKKLIIFLNENNVPVQLTSISAPEHKFEGLTQIFQKAYEHEQHISESINNIVDHAIKSKDHATFNFLQWYVAEQHEEEVLFKDILDKIELIGNENHGLYLADQYVKGIAKSRKSGS

SEQ ID NO: 359 - protein, 598 aa, synthetic construct
HHHHHHHHGPLEVLFQGPNITNLCPFGQVFNASNFPSVYAWERLRISDCVADYAVLYNSSSSFSTFKCYGVSPTKLNDLCFSSVYADYFVVKGDDVRQIAPAQTGVIADYNYKLPDDFTGCVLAWNTNSVDSKSGNNFYYRLFRHGKIKPYERDISNVLYNSAGGTCSSISQLGCYEPLKSYGFTPTVGVGYQPYRVVVLSFELLNAPATVCGPGSGGSGNITNLCPFGEVFNATRFASVYAWNRKRISNCVADYSVLYNSASFSTFKCYGVSPTKLNDLCFTNVYADSFVIRGDEVRQIAPGQTGKIADYNYKLPDDFTGCVIAWNSNNLDSKVGGNYNYLRRLFRKSNLKPFERDISTEIYQAGSTPCNGVEGFNCYFPLQSYGFQPTNGVGYQPYRVVVLSFENKSAPATVCGPGSGGGGESQVRQQFSKDIEKLLNEQVNKEMQSSNLYMSMSSWCYTHSLDGAGLFLFDHAAEEYEHAKKLIIFLNENNVPVQLTSISAPEHKFEGLTQIFQKAYEHEQHISESINNIVDHAIKSKDHATFNFLQWYVAEQHEEEVLFKDILDKIELIGNENHGLYLADQYVKGIAKSRKSGS

SEQ ID NO: 360 - protein, 598 aa, synthetic construct
HHHHHHHHGPLEVLFQGPNITNLCPFGQVFNASNFPSVYAWERLRISDCVADYAVLYNSSSSFSTFKCYGVSPTKLNDLCFSSVYADYFVVKGDDVRQIAPAQTGVIADYNYKLPDDFTGCVLAWNTNSVDSKSGNNFYYRLFRHGKIKPYERDISNVLYNSAGGTCSSISQLGCYEPLKSYGFWPTVGVGYQPYRVVVLSFELLNAPATVCGPGSGGSGNITNLCPFGEVFNATRFASVYAWNRKRISNCVADYSVLYNSASFSTFKCYGVSPTKLNDLCFTNVYADSFVIRGDEVRQIAPGQTGKIADYNYKLPDDFTGCVIAWNSNNLDSKVGGNYNYLRRLFRKSNLKPFERDISTEIYQAGSTPCNGVEGFNCYFPLQSYGFQPTNGVGYQPYRVVVLSFENKSAPATVCGPGSGGGGESQVRQQFSKDIEKLLNEQVNKEMQSSNLYMSMSSWCYTHSLDGAGLFLFDHAAEEYEHAKKLIIFLNENNVPVQLTSISAPEHKFEGLTQIFQKAYEHEQHISESINNIVDHAIKSKDHATFNFLQWYVAEQHEEEVLFKDILDKIELIGNENHGLYLADQYVKGIAKSRKSGS

SEQ ID NO: 361 - protein, 598 aa, synthetic construct
HHHHHHHHGPLEVLFQGPNITNLCPFGQVFNASNFPSVYAWERLRISDCVADYAVLYNSSSSFSTFKCYGVSPTKLNDLCFSSVYADYFVVKGDDVRQIAPAQTGVIADYNYKLPDDFTGCVLAWNTNSVDSKSGNNFYYRLFRHGKIKPYERDISNVLYNSAGGTCSSISQLGCYEPLYSYGFWPTVGVGYQPYRVVVLSFELLNAPATVCGPGSGGSGNITNLCPFGEVFNATRFASVYAWNRKRISNCVADYSVLYNSASFSTFKCYGVSPTKLNDLCFTNVYADSFVIRGDEVRQIAPGQTGKIADYNYKLPDDFTGCVIAWNSNNLDSKVGGNYNYLRRLFRKSNLKPFERDISTEIYQAGSTPCNGVEGFNCYFPLQSYGFQPTNGVGYQPYRVVVLSFENKSAPATVCGPGSGGGGESQVRQQFSKDIEKLLNEQVNKEMQSSNLYMSMSSWCYTHSLDGAGLFLFDHAAEEYEHAKKLIIFLNENNVPVQLTSISAPEHKFEGLTQIFQKAYEHEQHISESINNIVDHAIKSKDHATFNFLQWYVAEQHEEEVLFKDILDKIELIGNENHGLYLADQYVKGIAKSRKSGS

SEQ ID NO: 362 - protein, 595 aa, synthetic construct
HHHHHHHHGPLEVLFQGPNITNLCPFSQVFNATRFPSVYAWTRERISNCIADYSVLYNSTSFSTFRCYGVSPTKLNDLCFSNVYADSMVVRGDEVRQIAPSQTGVIADYNYKLPDDFTGCVIAWNSKAKDENGQYFYRLFRKSKLLPFQRDVSNVTYGSGKNDGCNPSEADCYWPLLKYGFTGSVSQDYQPYRVVVLSFELLNAPATVCGPGSGGSGNITNLCPFGEVFNATRFASVYAWNRKRISNCVADYSVLYNSASFSTFKCYGVSPTKLNDLCFTNVYADSFVIRGDEVRQIAPGQTGKIADYNYKLPDDFTGCVIAWNSNNLDSKVGGNYNYLRRLFRKSNLKPFERDISTEIYQAGSTPCNGVEGFNCYFPLQSYGFQPTNGVGYQPYRVVVLSFENKSAPATVCGPGSGGGGESQVRQQFSKDIEKLLNEQVNKEMQSSNLYMSMSSWCYTHSLDGAGLFLFDHAAEEYEHAKKLIIFLNENNVPVQLTSISAPEHKFEGLTQIFQKAYEHEQHISESINNIVDHAIKSKDHATFNFLQWYVAEQHEEEVLFKDILDKIELIGNENHGLYLADQYVKGIAKSRKSGS

SEQ ID NO: 363 - protein, 581 aa, synthetic construct
HHHHHHHHGPLEVLFQGPNITNRCPFDKVFNATRFPNVYAWERTKISDCVADYTVLYNSTSFSTFKCYGVSPSKLIDLCFTSVYADTFLIRSSEVRQVAPGETGVIADYNYKLPDDFTGCVIAWNTAKHDTGNYYYRSHRKTKLKPFERDLSSDDGNGVYTLSTYDFNPNVPVAYQATRVVVLSFELLNAPATVCGPGSGGSGNITNLCPFGEVFNATRFASVYAWNRKRISNCVADYSVLYNSASFSTFKCYGVSPTKLNDLCFTNVYADSFVIRGDEVRQIAPGQTGKIADYNYKLPDDFTGCVIAWNSNNLDSKVGGNYNYLRRLFRKSNLKPFERDISTEIYQAGSTPCNGVEGFNCYFPLQSYGFQPTNGVGYQPYRVVVLSFENKSAPATVCGPGSGGGGESQVRQQFSKDIEKLLNEQVNKEMQSSNLYMSMSSWCYTHSLDGAGLFLFDHAAEEYEHAKKLIIFLNENNVPVQLTSISAPEHKFEGLTQIFQKAYEHEQHISESINNIVDHAIKSKDHATFNFLQWYVAEQHEEEVLFKDILDKIELIGNENHGLYLADQYVKGIAKSRKSGS

SEQ ID NO: 364 - protein, 596 aa, synthetic construct
HHHHHHHHGPLEVLFQGPNVTQLCPFSDVFNRTMFPSVYAWERMSIRDCVADYAVLYNSSISFSTFECYGVSPTKLNDLCFSSVYADYFVVRGDDVKQIAPGKTGVIADYNYKLPDDFVGCVLAWNSRHVDNKQGFYYRLFRHGKIKPYQRDMSRELYSPSGTPCTVVGFNCYDPLAHYAFASPGIGIGYQPFRVVVLSFQLLNAPATVCGPGSGGSGNITNLCPFGEVFNATRFASVYAWNRKRISNCVADYSVLYNSASFSTFKCYGVSPTKLNDLCFTNVYADSFVIRGDEVRQIAPGQTGKIADYNYKLPDDFTGCVIAWNSNNLDSKVGGNYNYLRRLFRKSNLKPFERDISTEIYQAGSTPCNGVEGFNCYFPLQSYGFQPTNGVGYQPYRVVVLSFENKSAPATVCGPGSGGGGESQVRQQFSKDIEKLLNEQVNKEMQSSNLYMSMSSWCYTHSLDGAGLFLFDHAAEEYEHAKKLIIFLNENNVPVQLTSISAPEHKFEGLTQIFQKAYEHEQHISESINNIVDHAIKSKDHATFNFLQWYVAEQHEEEVLFKDILDKIELIGNENHGLYLADQYVKGIAKSRKSGS

SEQ ID NO: 365 - protein, 598 aa, synthetic construct
HHHHHHHHGPLEVLFQGPNITNLCPFDEVFNATRFPSVYAWERKKISNCVADYSVLYNSTSFSTFKCYGVSPSKLNDLCFTSVYADSFVIRGDEVRQIAPGQTGVIADYNYKLPDDFTGCVIAWNTANQDSGEGGNPNYYYRSSRKSKLKPFERDLSSDEYNVGSQPCNRMGPNCYRTLSTYDFYPTVGVGYQPYRVVVLSFELLNAPATVCGPGSGGSGNITNLCPFGEVFNATRFASVYAWNRKRISNCVADYSVLYNSASFSTFKCYGVSPTKLNDLCFTNVYADSFVIRGDEVRQIAPGQTGKIADYNYKLPDDFTGCVIAWNSNNLDSKVGGNYNYLRRLFRKSNLKPFERDISTEIYQAGSTPCNGVEGFNCYFPLQSYGFQPTNGVGYQPYRVVVLSFENKSAPATVCGPGSGGGGESQVRQQFSKDIEKLLNEQVNKEMQSSNLYMSMSSWCYTHSLDGAGLFLFDHAAEEYEHAKKLIIFLNENNVPVQLTSISAPEHKFEGLTQIFQKAYEHEQHISESINNIVDHAIKSKDHATFNFLQWYVAEQHEEEVLFKDILDKIELIGNENHGLYLADQYVKGIAKSRKSGS

SEQ ID NO: 366 - protein, 685 aa, synthetic construct
HHHHHHHHGPLEVLFQGPNLPDCNIEEWLTAKSVPSPLNWERKTFSNCNFNLSSLLRFVQADSFSCNNIDASKVYGMCFGSISVDKFAIPNSRQVDLQLGNSGFLQSFNYKIDTTATSCQLYYSLPANNVTINNYNPSSWNRRYGFNDDTVFKPRPAGVLTNHDVVYSQQCFKVPNTFCPCKNNGSCVSSGKGTTNGSGTCPAGTNYRTCENTTWCACSCTPDPITASGPRKCPQKKSLVGVGEHCSGLGVDSDYCGNVSCLCSTDAFLGWSADSCLVNDRCNIFANIILNGINSGTTCSTGSGGSGNITNLCPFGEVFNATRFASVYAWNRKRISNCVADYSVLYNSASFSTFKCYGVSPTKLNDLCFTNVYADSFVIRGDEVRQIAPGQTGKIADYNYKLPDDFTGCVIAWNSNNLDSKVGGNYNYLRRLFRKSNLKPFERDISTEIYQAGSTPCNGVEGFNCYFPLQSYGFQPTNGVGYQPYRVVVLSFENKSAPATVCGPGSGGGGESQVRQQFSKDIEKLLNEQVNKEMQSSNLYMSMSSWCYTHSLDGAGLFLFDHAAEEYEHAKKLIIFLNENNVPVQLTSISAPEHKFEGLTQIFQKAYEHEQHISESINNIVDHAIKSKDHATFNFLQWYVAEQHEEEVLFKDILDKIELIGNENHGLYLADQYVKGIAKSRKSGS

SEQ ID NO: 367 - protein, 611 aa, synthetic construct
HHHHHHHHGPLEVLFQGPQGVECDFSKLFKAAAPQIYNFSRLVFTNCNYNLTKLLSLFQVDEFSCHQISPSALASGCYSSLTVDYFAYPLSMKSYLQIGSAGEISQFNYKQDFSNPTCRILASVPANVSITKPDKYIYISQCYSLSAYSDVDVPHYVNPGQYTSIPCLYLTSSGFDEDGQYFRYNLTQFEGQNYLVATGVTVSMTDNLQMVFVITVQYGTDTNSVCPGSGGSGNITNLCPFGEVFNATRFASVYAWNRKRISNCVADYSVLYNSASFSTFKCYGVSPTKLNDLCFTNVYADSFVIRGDEVRQIAPGQTGKIADYNYKLPDDFTGCVIAWNSNNLDSKVGGNYNYLRRLFRKSNLKPFERDISTEIYQAGSTPCNGVEGFNCYFPLQSYGFQPTNGVGYQPYRVVVLSFENKSAPATVCGPGSGGGGESQVRQQFSKDIEKLLNEQVNKEMQSSNLYMSMSSWCYTHSLDGAGLFLFDHAAEEYEHAKKLIIFLNENNVPVQLTSISAPEHKFEGLTQIFQKAYEHEQHISESINNIVDHAIKSKDHATFNFLQWYVAEQHEEEVLFKDILDKIELIGNENHGLYLADQYVKGIAKSRKSGS

SEQ ID NO: 368 - protein, 610 aa, synthetic construct
HHHHHHHHGPLEVLFQGPELTECDLDVLFKNDAPIIANYSRRVFTNCNYNLTKLLSLVQVDEFVCHKTTPEALATGCYSSLTVDWFALPFSMKSTLAIGSAEAISMFNYNQDYSNPTCRIHAAVTANVSTALNFTANANYAYISRCQGVDGKPILLQPGQMTNIACRSGVLARPSDADYFGYSFQGRNYYLGRKSYKPKTDEGDVQMVYVITPKYDKGPDTVCPLKGSGGSGNITNLCPFGEVFNATRFASVYAWNRKRISNCVADYSVLYNSASFSTFKCYGVSPTKLNDLCFTNVYADSFVIRGDEVRQIAPGQTGKIADYNYKLPDDFTGCVIAWNSNNLDSKVGGNYNYLRRLFRKSNLKPFERDISTEIYQAGSTPCNGVEGFNCYFPLQSYGFQPTNGVGYQPYRVVVLSFENKSAPATVCGPGSGGGGESQVRQQFSKDIEKLLNEQVNKEMQSSNLYMSMSSWCYTHSLDGAGLFLFDHAAEEYEHAKKLIIFLNENNVPVQLTSISAPEHKFEGLTQIFQKAYEHEQHISESINNIVDHAIKSKDHATFNFLQWYVAEQHEEEVLFKDILDKIELIGNENHGLYLADQYVKGIAKSRKSGS

SEQ ID NO: 369 - protein, 606 aa, synthetic construct
HHHHHHHHGPLEVLFQGPVYPDCNFTELFRERAPTIMQYKREVFTRCNYNLSLLLSLVQVDEFVCDKITPEALATGCYSSLTVDWFAFPYAWKSYLAIGSADRIVRFNYNQDYSNPSCRIHSKVNSSIGISYAGAYSYITNCNYGATNKDDVVKPGGRASQQCITGALNSPTTGQLWAYNFGGVPYRVSRLTYTDHLSDPLDMVYVITVKYEPGAETVCPKQGSGGSGNITNLCPFGEVFNATRFASVYAWNRKRISNCVADYSVLYNSASFSTFKCYGVSPTKLNDLCFTNVYADSFVIRGDEVRQIAPGQTGKIADYNYKLPDDFTGCVIAWNSNNLDSKVGGNYNYLRRLFRKSNLKPFERDISTEIYQAGSTPCNGVEGFNCYFPLQSYGFQPTNGVGYQPYRVVVLSFENKSAPATVCGPGSGGGGESQVRQQFSKDIEKLLNEQVNKEMQSSNLYMSMSSWCYTHSLDGAGLFLFDHAAEEYEHAKKLIIFLNENNVPVQLTSISAPEHKFEGLTQIFQKAYEHEQHISESINNIVDHAIKSKDHATFNFLQWYVAEQHEEEVLFKDILDKIELIGNENHGLYLADQYVKGIAKSRKSGS

SEQ ID NO: 370 - protein, 612 aa, synthetic construct
HHHHHHHHGPLEVLFQGPQATECDFSPMLTGVAPQVYNFKRLVFSNCNYNLTKLLSLFAVDEFSCNGISPDAIARGCYSTLTVDYFAYPLSMKSYIRPGSAGNIPLYNYKQSFANPTCRVMASVPANVTITKPDAYGYISKCSRLTGANQDVETPLYINPGEYSICRDFSPGGFSEDGQVFKRTLTQFEGGGLLIGVGTRVPMTDNLQMSFIIFVQYGTGTDSVCPMLGSGGSGNITNLCPFGEVFNATRFASVYAWNRKRISNCVADYSVLYNSASFSTFKCYGVSPTKLNDLCFTNVYADSFVIRGDEVRQIAPGQTGKIADYNYKLPDDFTGCVIAWNSNNLDSKVGGNYNYLRRLFRKSNLKPFERDISTEIYQAGSTPCNGVEGFNCYFPLQSYGFQPTNGVGYQPYRVVVLSFENKSAPATVCGPGSGGGGESQVRQQFSKDIEKLLNEQVNKEMQSSNLYMSMSSWCYTHSLDGAGLFLFDHAAEEYEHAKKLIIFLNENNVPVQLTSISAPEHKFEGLTQIFQKAYEHEQHISESINNIVDHAIKSKDHATFNFLQWYVAEQHEEEVLFKDILDKIELIGNENHGLYLADQYVKGIAKSRKSGS

SEQ ID NO: 371 - protein, 603 aa, synthetic construct
HHHHHHHHGPLEVLFQGPQGVECDFSKLFKAAPPQIYNFSRLVFTNCNYNLTKLLSLFHVSEFSCHQVSPSALASGCYSSLTVDYFAYPLYLASYLQQGSTGEIAQYNYKQDFSNPTCRILASVPANVSIPKPDKYIWLSQCYSFSAYSGDIPHYVQPGQYTPCLYLTSSGFDKSYQTNRDMQNKMAATGVTSSMTDNLQMAFVISVQYGTDTNSVCPMGSGGSGNITNLCPFGEVFNATRFASVYAWNRKRISNCVADYSVLYNSASFSTFKCYGVSPTKLNDLCFTNVYADSFVIRGDEVRQIAPGQTGKIADYNYKLPDDFTGCVIAWNSNNLDSKVGGNYNYLRRLFRKSNLKPFERDISTEIYQAGSTPCNGVEGFNCYFPLQSYGFQPTNGVGYQPYRVVVLSFENKSAPATVCGPGSGGGGESQVRQQFSKDIEKLLNEQVNKEMQSSNLYMSMSSWCYTHSLDGAGLFLFDHAAEEYEHAKKLIIFLNENNVPVQLTSISAPEHKFEGLTQIFQKAYEHEQHISESINNIVDHAIKSKDHATFNFLQWYVAEQHEEEVLFKDILDKIELIGNENHGLYLADQYVKGIAKSRKSGS

SEQ ID NO: 372 - protein, 603 aa, synthetic construct
HHHHHHHHGPLEVLFQGPQGVECDFSKLFKAAPPQIYNFSRLVFTNCNYNLTKLLSLFHVSEFSCHQVSPSALASGCYSSLTVDYFAYPLYLASYLQQGSTGEIAQYNYKQDFSNPTCRILASVPANVSIPKPDKYIWLSQCYSFSAYSGDVPHYVLPGQYTPCLYLTSSGFDNSYQTNRDFQNKMAATGVISSMTDNLQMAFVISVQYGTDTNSVCPMGSGGSGNITNLCPFGEVFNATRFASVYAWNRKRISNCVADYSVLYNSASFSTFKCYGVSPTKLNDLCFTNVYADSFVIRGDEVRQIAPGQTGKIADYNYKLPDDFTGCVIAWNSNNLDSKVGGNYNYLRRLFRKSNLKPFERDISTEIYQAGSTPCNGVEGFNCYFPLQSYGFQPTNGVGYQPYRVVVLSFENKSAPATVCGPGSGGGGESQVRQQFSKDIEKLLNEQVNKEMQSSNLYMSMSSWCYTHSLDGAGLFLFDHAAEEYEHAKKLIIFLNENNVPVQLTSISAPEHKFEGLTQIFQKAYEHEQHISESINNIVDHAIKSKDHATFNFLQWYVAEQHEEEVLFKDILDKIELIGNENHGLYLADQYVKGIAKSRKSGS

SEQ ID NO: 373 - protein, 601 aa, synthetic construct
HHHHHHHHGPLEVLFQGPTTQECDFTPMLTGTPPPIYNFKRLVFTNCNYNLTKLLSLFQVSEFSCHQVSPSSLATGCYSSLTVDYFAYSTDMSSYLQPGSAGAIVQFNYKQDFSNPTCRVLATVPQNLTTITKPSNYAYLTECYKTSAYGKNYLYNAPGAYTPCLSLASRGFSTKYQSHSDGELTTTGYIYPVTGNLQMAFIISVQYGTDTNSVCPMGSGGSGNITNLCPFGEVFNATRFASVYAWNRKRISNCVADYSVLYNSASFSTFKCYGVSPTKLNDLCFTNVYADSFVIRGDEVRQIAPGQTGKIADYNYKLPDDFTGCVIAWNSNNLDSKVGGNYNYLRRLFRKSNLKPFERDISTEIYQAGSTPCNGVEGFNCYFPLQSYGFQPTNGVGYQPYRVVVLSFENKSAPATVCGPGSGGGGESQVRQQFSKDIEKLLNEQVNKEMQSSNLYMSMSSWCYTHSLDGAGLFLFDHAAEEYEHAKKLIIFLNENNVPVQLTSISAPEHKFEGLTQIFQKAYEHEQHISESINNIVDHAIKSKDHATFNFLQWYVAEQHEEEVLFKDILDKIELIGNENHGLYLADQYVKGIAKSRKSGS

SEQ ID NO: 374 - protein, 1077 aa, synthetic construct
HHHHHHHHGPLEVLFQGPNITNLCPFDEVFNATRFASVYAWNRKRISNCVADYSVLYNFAPFFAFKCYGVSPTKLNDLCFTNVYADSFVIRGNEVSQIAPGQTGNIADYNYKLPDDFTGCVIAWNSNKLDSKVGGNYNYRYRLFRKSNLKPFERDISTEIYQAGNKPCNGVAGVNCYFPLQSYGFRPTYGVGHQPYRVVVLSFELLHAPATVCGPGSGGSGSSQCVNLTTRTQLPPAYTNSFTRGVYYPDKVFRSSVLHSTQDLFLPFFSNVTWFHAIHVSGTNGTKRFDNPVLPFNDGVYFASTEKSNIIRGWIFGTTLDSKTQSLLIVNNATNVVIKVCEFQFCNDPFLGVYYHKNNKSWMESEFRVYSSANNCTFEYVSQPFLMDLEGKQGNFKNLREFVFKNIDGYFKIYSKHTPINLVRDLPQGFSALEPLVDLPIGINITRFQTLLALHRSYLTPGDSSSGWTAGAAAYYVGYLQPRTFLLKYNENGTITDAVDCALDPLSETKCTLKSFTVEKGIYQTSNFRVQPTESIVRFPNITNLCPFGEVFNATRFASVYAWNRKRISNCVADYSVLYNSASFSTFKCYGVSPTKLNDLCFTNVYADSFVIRGDEVRQIAPGQTGKIADYNYKLPDDFTGCVIAWNSNNLDSKVGGNYNYLYRLFRKSNLKPFERDISTEIYQAGSTPCNGVEGFNCYFPLQSYGFQPTNGVGYQPYRVVVLSFELLHAPATVCGPKKSTNLVKNKCVNFNFNGLTGTGVLTESNKKFLPFQQFGRDIADTTDAVRDPQTLEILDITPCSFGGVSVITPGTNTSNQVAVLYQDVNCTEVPVAIHADQLTPTWRVYSTGSNVFQTRAGCLIGAEHVNNSYECDIPIGAGICASYQTGGSQSIIAYTGSGGGGESQVRQQFSKDIEKLLNEQVNKEMQSSNLYMSMSSWCYTHSLDGAGLFLFDHAAEEYEHAKKLIIFLNENNVPVQLTSISAPEHKFEGLTQIFQKAYEHEQHISESINNIVDHAIKSKDHATFNFLQWYVAEQHEEEVLFKDILDKIELIGNENHGLYLADQYVKGIAKSRKSGS

SEQ ID NO: 375 - protein, 1077 aa, synthetic construct
HHHHHHHHGPLEVLFQGPNITNLCPFDEVFNATRFASVYAWNRKRISNCVADYSVLYNFAPFFAFKCYGVSPTKLNDLCFTNVYADSFVIRGNEVSQIAPGQTGNIADYNYKLPDDFTGCVIAWNSNKLDSKVGGNYNYQYRLFRKSNLKPFERDISTEIYQAGNKPCNGVAGFNCYFPLRSYGFRPTYGVGHQPYRVVVLSFELLHAPATVCGPGSGGSGSSQCVNLTTRTQLPPAYTNSFTRGVYYPDKVFRSSVLHSTQDLFLPFFSNVTWFHAIHVSGTNGTKRFDNPVLPFNDGVYFASTEKSNIIRGWIFGTTLDSKTQSLLIVNNATNVVIKVCEFQFCNDPFLGVYYHKNNKSWMESEFRVYSSANNCTFEYVSQPFLMDLEGKQGNFKNLREFVFKNIDGYFKIYSKHTPINLVRDLPQGFSALEPLVDLPIGINITRFQTLLALHRSYLTPGDSSSGWTAGAAAYYVGYLQPRTFLLKYNENGTITDAVDCALDPLSETKCTLKSFTVEKGIYQTSNFRVQPTESIVRFPNITNLCPFGEVFNATRFASVYAWNRKRISNCVADYSVLYNSASFSTFKCYGVSPTKLNDLCFTNVYADSFVIRGDEVRQIAPGQTGKIADYNYKLPDDFTGCVIAWNSNNLDSKVGGNYNYLYRLFRKSNLKPFERDISTEIYQAGSTPCNGVEGFNCYFPLQSYGFQPTNGVGYQPYRVVVLSFELLHAPATVCGPKKSTNLVKNKCVNFNFNGLTGTGVLTESNKKFLPFQQFGRDIADTTDAVRDPQTLEILDITPCSFGGVSVITPGTNTSNQVAVLYQDVNCTEVPVAIHADQLTPTWRVYSTGSNVFQTRAGCLIGAEHVNNSYECDIPIGAGICASYQTGGSQSIIAYTGSGGGGESQVRQQFSKDIEKLLNEQVNKEMQSSNLYMSMSSWCYTHSLDGAGLFLFDHAAEEYEHAKKLIIFLNENNVPVQLTSISAPEHKFEGLTQIFQKAYEHEQHISESINNIVDHAIKSKDHATFNFLQWYVAEQHEEEVLFKDILDKIELIGNENHGLYLADQYVKGIAKSRKSGS

SEQ ID NO: 376 - protein, 1073 aa, synthetic construct
HHHHHHHHGPLEVLFQGPNITQLCPFNEVFNITSFPSVYAWERMRITNCVADYSVLYNSSASFSTFQCYGVSPTKLNDLCFSSVYADYFVVKGDDVRQIAPAQTGVIADYNYKLPDDFTGCVIAWNTNSLDSSNEFFYRRFRHGKIKPYGRDLSNVLFNPSGGTCSAEGLNCYKPLASYGFTQSSGIGFQPYRVVVLSFELLNAPATVCGPGSGGSGSSQCVNLTTRTQLPPAYTNSFTRGVYYPDKVFRSSVLHSTQDLFLPFFSNVTWFHAIHVSGTNGTKRFDNPVLPFNDGVYFASTEKSNIIRGWIFGTTLDSKTQSLLIVNNATNVVIKVCEFQFCNDPFLGVYYHKNNKSWMESEFRVYSSANNCTFEYVSQPFLMDLEGKQGNFKNLREFVFKNIDGYFKIYSKHTPINLVRDLPQGFSALEPLVDLPIGINITRFQTLLALHRSYLTPGDSSSGWTAGAAAYYVGYLQPRTFLLKYNENGTITDAVDCALDPLSETKCTLKSFTVEKGIYQTSNFRVQPTESIVRFPNITNLCPFGEVFNATRFASVYAWNRKRISNCVADYSVLYNSASFSTFKCYGVSPTKLNDLCFTNVYADSFVIRGDEVRQIAPGQTGKIADYNYKLPDDFTGCVIAWNSNNLDSKVGGNYNYLYRLFRKSNLKPFERDISTEIYQAGSTPCNGVEGFNCYFPLQSYGFQPTNGVGYQPYRVVVLSFELLHAPATVCGPKKSTNLVKNKCVNFNFNGLTGTGVLTESNKKFLPFQQFGRDIADTTDAVRDPQTLEILDITPCSFGGVSVITPGTNTSNQVAVLYQDVNCTEVPVAIHADQLTPTWRVYSTGSNVFQTRAGCLIGAEHVNNSYECDIPIGAGICASYQTGGSQSIIAYTGSGGGGESQVRQQFSKDIEKLLNEQVNKEMQSSNLYMSMSSWCYTHSLDGAGLFLFDHAAEEYEHAKKLIIFLNENNVPVQLTSISAPEHKFEGLTQIFQKAYEHEQHISESINNIVDHAIKSKDHATFNFLQWYVAEQHEEEVLFKDILDKIELIGNENHGLYLADQYVKGIAKSRKSGS

SEQ ID NO: 377 - protein, 1073 aa, synthetic construct
HHHHHHHHGPLEVLFQGPNITQLCPFNEVFNITSFPSVYAWERMRITNCVADYSVLYNSSASFSTFQCYGVSPTKLNDLCFSSVYADYFVVKGDDVRQIAPAQTGVIADYNYKLPDDFTGCVIAWNTNSLDSSNEFFYRRFRHGKIKPYGRDLSNVLFNPSGGTCSAEGLNCYKPLASYGFWQSSGIGFQPYRVVVLSFELLNAPATVCGPGSGGSGSSQCVNLTTRTQLPPAYTNSFTRGVYYPDKVFRSSVLHSTQDLFLPFFSNVTWFHAIHVSGTNGTKRFDNPVLPFNDGVYFASTEKSNIIRGWIFGTTLDSKTQSLLIVNNATNVVIKVCEFQFCNDPFLGVYYHKNNKSWMESEFRVYSSANNCTFEYVSQPFLMDLEGKQGNFKNLREFVFKNIDGYFKIYSKHTPINLVRDLPQGFSALEPLVDLPIGINITRFQTLLALHRSYLTPGDSSSGWTAGAAAYYVGYLQPRTFLLKYNENGTITDAVDCALDPLSETKCTLKSFTVEKGIYQTSNFRVQPTESIVRFPNITNLCPFGEVFNATRFASVYAWNRKRISNCVADYSVLYNSASFSTFKCYGVSPTKLNDLCFTNVYADSFVIRGDEVRQIAPGQTGKIADYNYKLPDDFTGCVIAWNSNNLDSKVGGNYNYLYRLFRKSNLKPFERDISTEIYQAGSTPCNGVEGFNCYFPLQSYGFQPTNGVGYQPYRVVVLSFELLHAPATVCGPKKSTNLVKNKCVNFNFNGLTGTGVLTESNKKFLPFQQFGRDIADTTDAVRDPQTLEILDITPCSFGGVSVITPGTNTSNQVAVLYQDVNCTEVPVAIHADQLTPTWRVYSTGSNVFQTRAGCLIGAEHVNNSYECDIPIGAGICASYQTGGSQSIIAYTGSGGGGESQVRQQFSKDIEKLLNEQVNKEMQSSNLYMSMSSWCYTHSLDGAGLFLFDHAAEEYEHAKKLIIFLNENNVPVQLTSISAPEHKFEGLTQIFQKAYEHEQHISESINNIVDHAIKSKDHATFNFLQWYVAEQHEEEVLFKDILDKIELIGNENHGLYLADQYVKGIAKSRKSGS

SEQ ID NO: 378 - protein, 1073 aa, synthetic construct
HHHHHHHHGPLEVLFQGPNITQLCPFNEVFNITSFPSVYAWERMRITNCVADYSVLYNSSASFSTFQCYGVSPTKLNDLCFSSVYADYFVVKGDDVRQIAPAQTGVIADYNYKLPDDFTGCVIAWNTNSLDSSNEFFYRRFRHGKIKPYGRDLSNVLFNPSGGTCSAEGLNCYKPLYSYGFWQSSGIGFQPYRVVVLSFELLNAPATVCGPGSGGSGSSQCVNLTTRTQLPPAYTNSFTRGVYYPDKVFRSSVLHSTQDLFLPFFSNVTWFHAIHVSGTNGTKRFDNPVLPFNDGVYFASTEKSNIIRGWIFGTTLDSKTQSLLIVNNATNVVIKVCEFQFCNDPFLGVYYHKNNKSWMESEFRVYSSANNCTFEYVSQPFLMDLEGKQGNFKNLREFVFKNIDGYFKIYSKHTPINLVRDLPQGFSALEPLVDLPIGINITRFQTLLALHRSYLTPGDSSSGWTAGAAAYYVGYLQPRTFLLKYNENGTITDAVDCALDPLSETKCTLKSFTVEKGIYQTSNFRVQPTESIVRFPNITNLCPFGEVFNATRFASVYAWNRKRISNCVADYSVLYNSASFSTFKCYGVSPTKLNDLCFTNVYADSFVIRGDEVRQIAPGQTGKIADYNYKLPDDFTGCVIAWNSNNLDSKVGGNYNYLYRLFRKSNLKPFERDISTEIYQAGSTPCNGVEGFNCYFPLQSYGFQPTNGVGYQPYRVVVLSFELLHAPATVCGPKKSTNLVKNKCVNFNFNGLTGTGVLTESNKKFLPFQQFGRDIADTTDAVRDPQTLEILDITPCSFGGVSVITPGTNTSNQVAVLYQDVNCTEVPVAIHADQLTPTWRVYSTGSNVFQTRAGCLIGAEHVNNSYECDIPIGAGICASYQTGGSQSIIAYTGSGGGGESQVRQQFSKDIEKLLNEQVNKEMQSSNLYMSMSSWCYTHSLDGAGLFLFDHAAEEYEHAKKLIIFLNENNVPVQLTSISAPEHKFEGLTQIFQKAYEHEQHISESINNIVDHAIKSKDHATFNFLQWYVAEQHEEEVLFKDILDKIELIGNENHGLYLADQYVKGIAKSRKSGS

SEQ ID NO: 379 - protein, 1076 aa, synthetic construct
HHHHHHHHGPLEVLFQGPNITNLCPFGEVFNATTFPSVYAWERKRISNCVADYSVLYNSTSFSTFKCYGVSATKLNDLCFSNVYADSFVVKGDDVRQIAPGQTGVIADYNYKLPDDFLGCVLAWNTNSKDSSTSGNYNYLYRWVRRSKLNPYERDLSNDIYSPGGQSCSAVGPNCYNPLRPYGFFTTAGVGHQPYRVVVLSFELLNAPATVCGPGSGGSGSSQCVNLTTRTQLPPAYTNSFTRGVYYPDKVFRSSVLHSTQDLFLPFFSNVTWFHAIHVSGTNGTKRFDNPVLPFNDGVYFASTEKSNIIRGWIFGTTLDSKTQSLLIVNNATNVVIKVCEFQFCNDPFLGVYYHKNNKSWMESEFRVYSSANNCTFEYVSQPFLMDLEGKQGNFKNLREFVFKNIDGYFKIYSKHTPINLVRDLPQGFSALEPLVDLPIGINITRFQTLLALHRSYLTPGDSSSGWTAGAAAYYVGYLQPRTFLLKYNENGTITDAVDCALDPLSETKCTLKSFTVEKGIYQTSNFRVQPTESIVRFPNITNLCPFGEVFNATRFASVYAWNRKRISNCVADYSVLYNSASFSTFKCYGVSPTKLNDLCFTNVYADSFVIRGDEVRQIAPGQTGKIADYNYKLPDDFTGCVIAWNSNNLDSKVGGNYNYLYRLFRKSNLKPFERDISTEIYQAGSTPCNGVEGFNCYFPLQSYGFQPTNGVGYQPYRVVVLSFELLHAPATVCGPKKSTNLVKNKCVNFNFNGLTGTGVLTESNKKFLPFQQFGRDIADTTDAVRDPQTLEILDITPCSFGGVSVITPGTNTSNQVAVLYQDVNCTEVPVAIHADQLTPTWRVYSTGSNVFQTRAGCLIGAEHVNNSYECDIPIGAGICASYQTGGSQSIIAYTGSGGGGESQVRQQFSKDIEKLLNEQVNKEMQSSNLYMSMSSWCYTHSLDGAGLFLFDHAAEEYEHAKKLIIFLNENNVPVQLTSISAPEHKFEGLTQIFQKAYEHEQHISESINNIVDHAIKSKDHATFNFLQWYVAEQHEEEVLFKDILDKIELIGNENHGLYLADQYVKGIAKSRKSGS

SEQ ID NO: 380 - protein, 1076 aa, synthetic construct
HHHHHHHHGPLEVLFQGPNITNLCPFGEVFNATTFPSVYAWERKRISNCVADYSVLYNSTSFSTFKCYGVSATKLNDLCFSNVYADSFVVKGDDVRQIAPGQTGVIADYNYKLPDDFTGCVLAWNTRNIDATQTGNYNYKYRSLRHGKLRPFERDISNVPFSPDGKPCTPPAFNCYWPLNDYGFYITNGIGYQPYRVVVLSFELLNAPATVCGPGSGGSGSSQCVNLTTRTQLPPAYTNSFTRGVYYPDKVFRSSVLHSTQDLFLPFFSNVTWFHAIHVSGTNGTKRFDNPVLPFNDGVYFASTEKSNIIRGWIFGTTLDSKTQSLLIVNNATNVVIKVCEFQFCNDPFLGVYYHKNNKSWMESEFRVYSSANNCTFEYVSQPFLMDLEGKQGNFKNLREFVFKNIDGYFKIYSKHTPINLVRDLPQGFSALEPLVDLPIGINITRFQTLLALHRSYLTPGDSSSGWTAGAAAYYVGYLQPRTFLLKYNENGTITDAVDCALDPLSETKCTLKSFTVEKGIYQTSNFRVQPTESIVRFPNITNLCPFGEVFNATRFASVYAWNRKRISNCVADYSVLYNSASFSTFKCYGVSPTKLNDLCFTNVYADSFVIRGDEVRQIAPGQTGKIADYNYKLPDDFTGCVIAWNSNNLDSKVGGNYNYLYRLFRKSNLKPFERDISTEIYQAGSTPCNGVEGFNCYFPLQSYGFQPTNGVGYQPYRVVVLSFELLHAPATVCGPKKSTNLVKNKCVNFNFNGLTGTGVLTESNKKFLPFQQFGRDIADTTDAVRDPQTLEILDITPCSFGGVSVITPGTNTSNQVAVLYQDVNCTEVPVAIHADQLTPTWRVYSTGSNVFQTRAGCLIGAEHVNNSYECDIPIGAGICASYQTGGSQSIIAYTGSGGGGESQVRQQFSKDIEKLLNEQVNKEMQSSNLYMSMSSWCYTHSLDGAGLFLFDHAAEEYEHAKKLIIFLNENNVPVQLTSISAPEHKFEGLTQIFQKAYEHEQHISESINNIVDHAIKSKDHATFNFLQWYVAEQHEEEVLFKDILDKIELIGNENHGLYLADQYVKGIAKSRKSGS

SEQ ID NO: 381 - protein, 1058 aa, synthetic construct
HHHHHHHHGPLEVLFQGPNITNVCPFHKVFNATRFPSVYAWERTKISDCIADYTVFYNSTSFSTFKCYGVSPSKLIDLCFTSVYADTFLIRFSEVRQVAPGQTGVIADYNYKLPDDFTGCVIAWNTAKQDTGHYFYRSHRSTKLKPFERDLSSDENGVRTLSTYDFNPNVPLEYQATRVVVLSFELLNAPATVCGPGSGGSGSSQCVNLTTRTQLPPAYTNSFTRGVYYPDKVFRSSVLHSTQDLFLPFFSNVTWFHAIHVSGTNGTKRFDNPVLPFNDGVYFASTEKSNIIRGWIFGTTLDSKTQSLLIVNNATNVVIKVCEFQFCNDPFLGVYYHKNNKSWMESEFRVYSSANNCTFEYVSQPFLMDLEGKQGNFKNLREFVFKNIDGYFKIYSKHTPINLVRDLPQGFSALEPLVDLPIGINITRFQTLLALHRSYLTPGDSSSGWTAGAAAYYVGYLQPRTFLLKYNENGTITDAVDCALDPLSETKCTLKSFTVEKGIYQTSNFRVQPTESIVRFPNITNLCPFGEVFNATRFASVYAWNRKRISNCVADYSVLYNSASFSTFKCYGVSPTKLNDLCFTNVYADSFVIRGDEVRQIAPGQTGKIADYNYKLPDDFTGCVIAWNSNNLDSKVGGNYNYLYRLFRKSNLKPFERDISTEIYQAGSTPCNGVEGFNCYFPLQSYGFQPTNGVGYQPYRVVVLSFELLHAPATVCGPKKSTNLVKNKCVNFNFNGLTGTGVLTESNKKFLPFQQFGRDIADTTDAVRDPQTLEILDITPCSFGGVSVITPGTNTSNQVAVLYQDVNCTEVPVAIHADQLTPTWRVYSTGSNVFQTRAGCLIGAEHVNNSYECDIPIGAGICASYQTGGSQSIIAYTGSGGGGESQVRQQFSKDIEKLLNEQVNKEMQSSNLYMSMSSWCYTHSLDGAGLFLFDHAAEEYEHAKKLIIFLNENNVPVQLTSISAPEHKFEGLTQIFQKAYEHEQHISESINNIVDHAIKSKDHATFNFLQWYVAEQHEEEVLFKDILDKIELIGNENHGLYLADQYVKGIAKSRKSGS

SEQ ID NO: 382 - protein, 1077 aa, synthetic construct
HHHHHHHHGPLEVLFQGPNITNLCPFGEVFNATTFASVYAWNRKRISNCVADYSVLYNSTSFSTFKCYGVSPTKLNDLCFTNVYADSFVVRGDEVRQIAPGQTGKIADYNYKLPDDFTGCVIAWNSNNLDSKVGGNYNYLYRLFRKSNLKPFERDISTEIYQAGSTPCNGVEGFNCYFPLQSYGFHPTNGVGYQPYRVVVLSFELLNAPATVCGPGSGGSGSSQCVNLTTRTQLPPAYTNSFTRGVYYPDKVFRSSVLHSTQDLFLPFFSNVTWFHAIHVSGTNGTKRFDNPVLPFNDGVYFASTEKSNIIRGWIFGTTLDSKTQSLLIVNNATNVVIKVCEFQFCNDPFLGVYYHKNNKSWMESEFRVYSSANNCTFEYVSQPFLMDLEGKQGNFKNLREFVFKNIDGYFKIYSKHTPINLVRDLPQGFSALEPLVDLPIGINITRFQTLLALHRSYLTPGDSSSGWTAGAAAYYVGYLQPRTFLLKYNENGTITDAVDCALDPLSETKCTLKSFTVEKGIYQTSNFRVQPTESIVRFPNITNLCPFGEVFNATRFASVYAWNRKRISNCVADYSVLYNSASFSTFKCYGVSPTKLNDLCFTNVYADSFVIRGDEVRQIAPGQTGKIADYNYKLPDDFTGCVIAWNSNNLDSKVGGNYNYLYRLFRKSNLKPFERDISTEIYQAGSTPCNGVEGFNCYFPLQSYGFQPTNGVGYQPYRVVVLSFELLHAPATVCGPKKSTNLVKNKCVNFNFNGLTGTGVLTESNKKFLPFQQFGRDIADTTDAVRDPQTLEILDITPCSFGGVSVITPGTNTSNQVAVLYQDVNCTEVPVAIHADQLTPTWRVYSTGSNVFQTRAGCLIGAEHVNNSYECDIPIGAGICASYQTGGSQSIIAYTGSGGGGESQVRQQFSKDIEKLLNEQVNKEMQSSNLYMSMSSWCYTHSLDGAGLFLFDHAAEEYEHAKKLIIFLNENNVPVQLTSISAPEHKFEGLTQIFQKAYEHEQHISESINNIVDHAIKSKDHATFNFLQWYVAEQHEEEVLFKDILDKIELIGNENHGLYLADQYVKGIAKSRKSGS

SEQ ID NO: 383 - protein, 1077 aa, synthetic construct
HHHHHHHHGPLEVLFQGPNITNLCPFGEVFNATTFASVYAWNRKRISNCVADYSVLYNSTSFSTFKCYGVSPTKLNDLCFTNVYADSFVITGDEVRQIAPGQTGKIADYNYKLPDDFTGCVIAWNSKHIDAKEGGNFNYLYRLFRKANLKPFERDISTEIYQAGSKPCNGQTGLNCYYPLYRYGFYPTDGVGHQPYRVVVLSFELLNAPATVCGPGSGGSGSSQCVNLTTRTQLPPAYTNSFTRGVYYPDKVFRSSVLHSTQDLFLPFFSNVTWFHAIHVSGTNGTKRFDNPVLPFNDGVYFASTEKSNIIRGWIFGTTLDSKTQSLLIVNNATNVVIKVCEFQFCNDPFLGVYYHKNNKSWMESEFRVYSSANNCTFEYVSQPFLMDLEGKQGNFKNLREFVFKNIDGYFKIYSKHTPINLVRDLPQGFSALEPLVDLPIGINITRFQTLLALHRSYLTPGDSSSGWTAGAAAYYVGYLQPRTFLLKYNENGTITDAVDCALDPLSETKCTLKSFTVEKGIYQTSNFRVQPTESIVRFPNITNLCPFGEVFNATRFASVYAWNRKRISNCVADYSVLYNSASFSTFKCYGVSPTKLNDLCFTNVYADSFVIRGDEVRQIAPGQTGKIADYNYKLPDDFTGCVIAWNSNNLDSKVGGNYNYLYRLFRKSNLKPFERDISTEIYQAGSTPCNGVEGFNCYFPLQSYGFQPTNGVGYQPYRVVVLSFELLHAPATVCGPKKSTNLVKNKCVNFNFNGLTGTGVLTESNKKFLPFQQFGRDIADTTDAVRDPQTLEILDITPCSFGGVSVITPGTNTSNQVAVLYQDVNCTEVPVAIHADQLTPTWRVYSTGSNVFQTRAGCLIGAEHVNNSYECDIPIGAGICASYQTGGSQSIIAYTGSGGGGESQVRQQFSKDIEKLLNEQVNKEMQSSNLYMSMSSWCYTHSLDGAGLFLFDHAAEEYEHAKKLIIFLNENNVPVQLTSISAPEHKFEGLTQIFQKAYEHEQHISESINNIVDHAIKSKDHATFNFLQWYVAEQHEEEVLFKDILDKIELIGNENHGLYLADQYVKGIAKSRKSGS

SEQ ID NO: 384 - protein, 1058 aa, synthetic construct
HHHHHHHHGPLEVLFQGPNITNFCPFDKVFNATRFPNVYAWQRTKISDCIADYTVLYNSTSFSTFKCYGVSPSKLIDLCFTSVYADTFLIRFSEVRQIAPGETGVIADYNYKLPDDFTGCVLAWNTAQQDIGSYFYRSHRAVKLKPFERDLSSDENGVRTLSTYDFNPNVPLDYQATRVVVLSFELLNAPATVCGPGSGGSGSSQCVNLTTRTQLPPAYTNSFTRGVYYPDKVFRSSVLHSTQDLFLPFFSNVTWFHAIHVSGTNGTKRFDNPVLPFNDGVYFASTEKSNIIRGWIFGTTLDSKTQSLLIVNNATNVVIKVCEFQFCNDPFLGVYYHKNNKSWMESEFRVYSSANNCTFEYVSQPFLMDLEGKQGNFKNLREFVFKNIDGYFKIYSKHTPINLVRDLPQGFSALEPLVDLPIGINITRFQTLLALHRSYLTPGDSSSGWTAGAAAYYVGYLQPRTFLLKYNENGTITDAVDCALDPLSETKCTLKSFTVEKGIYQTSNFRVQPTESIVRFPNITNLCPFGEVFNATRFASVYAWNRKRISNCVADYSVLYNSASFSTFKCYGVSPTKLNDLCFTNVYADSFVIRGDEVRQIAPGQTGKIADYNYKLPDDFTGCVIAWNSNNLDSKVGGNYNYLYRLFRKSNLKPFERDISTEIYQAGSTPCNGVEGFNCYFPLQSYGFQPTNGVGYQPYRVVVLSFELLHAPATVCGPKKSTNLVKNKCVNFNFNGLTGTGVLTESNKKFLPFQQFGRDIADTTDAVRDPQTLEILDITPCSFGGVSVITPGTNTSNQVAVLYQDVNCTEVPVAIHADQLTPTWRVYSTGSNVFQTRAGCLIGAEHVNNSYECDIPIGAGICASYQTGGSQSIIAYTGSGGGGESQVRQQFSKDIEKLLNEQVNKEMQSSNLYMSMSSWCYTHSLDGAGLFLFDHAAEEYEHAKKLIIFLNENNVPVQLTSISAPEHKFEGLTQIFQKAYEHEQHISESINNIVDHAIKSKDHATFNFLQWYVAEQHEEEVLFKDILDKIELIGNENHGLYLADQYVKGIAKSRKSGS

SEQ ID NO: 385 - protein, 1058 aa, synthetic construct
HHHHHHHHGPLEVLFQGPNITNFCPFDKVFNATRFPNVYAWQRTKISDCIADYTVLYNSTSFSTFKCYGVSPSKLIDLCFTSVYADTFLIRFSEVRQIAPGETGVIADYNYKLPDDFTGCVLAWNTAQQDIGSYFYRSHRAVKLKPFERDLSSDENGVRTLSTYDFWPNVPLDYQATRVVVLSFELLNAPATVCGPGSGGSGSSQCVNLTTRTQLPPAYTNSFTRGVYYPDKVFRSSVLHSTQDLFLPFFSNVTWFHAIHVSGTNGTKRFDNPVLPFNDGVYFASTEKSNIIRGWIFGTTLDSKTQSLLIVNNATNVVIKVCEFQFCNDPFLGVYYHKNNKSWMESEFRVYSSANNCTFEYVSQPFLMDLEGKQGNFKNLREFVFKNIDGYFKIYSKHTPINLVRDLPQGFSALEPLVDLPIGINITRFQTLLALHRSYLTPGDSSSGWTAGAAAYYVGYLQPRTFLLKYNENGTITDAVDCALDPLSETKCTLKSFTVEKGIYQTSNFRVQPTESIVRFPNITNLCPFGEVFNATRFASVYAWNRKRISNCVADYSVLYNSASFSTFKCYGVSPTKLNDLCFTNVYADSFVIRGDEVRQIAPGQTGKIADYNYKLPDDFTGCVIAWNSNNLDSKVGGNYNYLYRLFRKSNLKPFERDISTEIYQAGSTPCNGVEGFNCYFPLQSYGFQPTNGVGYQPYRVVVLSFELLHAPATVCGPKKSTNLVKNKCVNFNFNGLTGTGVLTESNKKFLPFQQFGRDIADTTDAVRDPQTLEILDITPCSFGGVSVITPGTNTSNQVAVLYQDVNCTEVPVAIHADQLTPTWRVYSTGSNVFQTRAGCLIGAEHVNNSYECDIPIGAGICASYQTGGSQSIIAYTGSGGGGESQVRQQFSKDIEKLLNEQVNKEMQSSNLYMSMSSWCYTHSLDGAGLFLFDHAAEEYEHAKKLIIFLNENNVPVQLTSISAPEHKFEGLTQIFQKAYEHEQHISESINNIVDHAIKSKDHATFNFLQWYVAEQHEEEVLFKDILDKIELIGNENHGLYLADQYVKGIAKSRKSGS

SEQ ID NO: 386 - protein, 1058 aa, synthetic construct
HHHHHHHHGPLEVLFQGPNITNFCPFDKVFNATRFPNVYAWQRTKISDCIADYTVLYNSTSFSTFKCYGVSPSKLIDLCFTSVYADTFLIRFSEVRQIAPGETGVIADYNYKLPDDFTGCVLAWNTAQQDIGSYFYRSHRAVKLKPFERDLSSDENGVRTLYTYDFWPNVPLDYQATRVVVLSFELLNAPATVCGPGSGGSGSSQCVNLTTRTQLPPAYTNSFTRGVYYPDKVFRSSVLHSTQDLFLPFFSNVTWFHAIHVSGTNGTKRFDNPVLPFNDGVYFASTEKSNIIRGWIFGTTLDSKTQSLLIVNNATNVVIKVCEFQFCNDPFLGVYYHKNNKSWMESEFRVYSSANNCTFEYVSQPFLMDLEGKQGNFKNLREFVFKNIDGYFKIYSKHTPINLVRDLPQGFSALEPLVDLPIGINITRFQTLLALHRSYLTPGDSSSGWTAGAAAYYVGYLQPRTFLLKYNENGTITDAVDCALDPLSETKCTLKSFTVEKGIYQTSNFRVQPTESIVRFPNITNLCPFGEVFNATRFASVYAWNRKRISNCVADYSVLYNSASFSTFKCYGVSPTKLNDLCFTNVYADSFVIRGDEVRQIAPGQTGKIADYNYKLPDDFTGCVIAWNSNNLDSKVGGNYNYLYRLFRKSNLKPFERDISTEIYQAGSTPCNGVEGFNCYFPLQSYGFQPTNGVGYQPYRVVVLSFELLHAPATVCGPKKSTNLVKNKCVNFNFNGLTGTGVLTESNKKFLPFQQFGRDIADTTDAVRDPQTLEILDITPCSFGGVSVITPGTNTSNQVAVLYQDVNCTEVPVAIHADQLTPTWRVYSTGSNVFQTRAGCLIGAEHVNNSYECDIPIGAGICASYQTGGSQSIIAYTGSGGGGESQVRQQFSKDIEKLLNEQVNKEMQSSNLYMSMSSWCYTHSLDGAGLFLFDHAAEEYEHAKKLIIFLNENNVPVQLTSISAPEHKFEGLTQIFQKAYEHEQHISESINNIVDHAIKSKDHATFNFLQWYVAEQHEEEVLFKDILDKIELIGNENHGLYLADQYVKGIAKSRKSGS

SEQ ID NO: 387 - protein, 1058 aa, synthetic construct
HHHHHHHHGPLEVLFQGPNITNLCPFDAVFNATRFPSVYAWERVKISNCVADYTAFYNSTSFSTFKCYGVSPSKLIDLCFTSVYADTFLIRFSEVRQVAPGETGVIADYNYKLPDDFTGCVIAWNTAKQDVGSYFYRSHRSSKLKPFERDLSSDENGVRTLSTYDFNPNVPLDYQATRVVVLSFELLNAPATVCGPGSGGSGSSQCVNLTTRTQLPPAYTNSFTRGVYYPDKVFRSSVLHSTQDLFLPFFSNVTWFHAIHVSGTNGTKRFDNPVLPFNDGVYFASTEKSNIIRGWIFGTTLDSKTQSLLIVNNATNVVIKVCEFQFCNDPFLGVYYHKNNKSWMESEFRVYSSANNCTFEYVSQPFLMDLEGKQGNFKNLREFVFKNIDGYFKIYSKHTPINLVRDLPQGFSALEPLVDLPIGINITRFQTLLALHRSYLTPGDSSSGWTAGAAAYYVGYLQPRTFLLKYNENGTITDAVDCALDPLSETKCTLKSFTVEKGIYQTSNFRVQPTESIVRFPNITNLCPFGEVFNATRFASVYAWNRKRISNCVADYSVLYNSASFSTFKCYGVSPTKLNDLCFTNVYADSFVIRGDEVRQIAPGQTGKIADYNYKLPDDFTGCVIAWNSNNLDSKVGGNYNYLYRLFRKSNLKPFERDISTEIYQAGSTPCNGVEGFNCYFPLQSYGFQPTNGVGYQPYRVVVLSFELLHAPATVCGPKKSTNLVKNKCVNFNFNGLTGTGVLTESNKKFLPFQQFGRDIADTTDAVRDPQTLEILDITPCSFGGVSVITPGTNTSNQVAVLYQDVNCTEVPVAIHADQLTPTWRVYSTGSNVFQTRAGCLIGAEHVNNSYECDIPIGAGICASYQTGGSQSIIAYTGSGGGGESQVRQQFSKDIEKLLNEQVNKEMQSSNLYMSMSSWCYTHSLDGAGLFLFDHAAEEYEHAKKLIIFLNENNVPVQLTSISAPEHKFEGLTQIFQKAYEHEQHISESINNIVDHAIKSKDHATFNFLQWYVAEQHEEEVLFKDILDKIELIGNENHGLYLADQYVKGIAKSRKSGS

SEQ ID NO: 388 - protein, 1058 aa, synthetic construct
HHHHHHHHGPLEVLFQGPNITNRCPFDKVFNATRFPSVYAWERTKISDCVADYTVLYNSTSFSTFKCYGVSPSKLIDLCFTSVYADTFLIRSSEVRQVAPGETGVIADYNYKLPDDFTGCVIAWNTANQDQGQYYYRSSRKEKLKPFERDLSSDENGVYTLSTYDFYPSVPLDYQATRVVVLSFELLNAPATVCGPGSGGSGSSQCVNLTTRTQLPPAYTNSFTRGVYYPDKVFRSSVLHSTQDLFLPFFSNVTWFHAIHVSGTNGTKRFDNPVLPFNDGVYFASTEKSNIIRGWIFGTTLDSKTQSLLIVNNATNVVIKVCEFQFCNDPFLGVYYHKNNKSWMESEFRVYSSANNCTFEYVSQPFLMDLEGKQGNFKNLREFVFKNIDGYFKIYSKHTPINLVRDLPQGFSALEPLVDLPIGINITRFQTLLALHRSYLTPGDSSSGWTAGAAAYYVGYLQPRTFLLKYNENGTITDAVDCALDPLSETKCTLKSFTVEKGIYQTSNFRVQPTESIVRFPNITNLCPFGEVFNATRFASVYAWNRKRISNCVADYSVLYNSASFSTFKCYGVSPTKLNDLCFTNVYADSFVIRGDEVRQIAPGQTGKIADYNYKLPDDFTGCVIAWNSNNLDSKVGGNYNYLYRLFRKSNLKPFERDISTEIYQAGSTPCNGVEGFNCYFPLQSYGFQPTNGVGYQPYRVVVLSFELLHAPATVCGPKKSTNLVKNKCVNFNFNGLTGTGVLTESNKKFLPFQQFGRDIADTTDAVRDPQTLEILDITPCSFGGVSVITPGTNTSNQVAVLYQDVNCTEVPVAIHADQLTPTWRVYSTGSNVFQTRAGCLIGAEHVNNSYECDIPIGAGICASYQTGGSQSIIAYTGSGGGGESQVRQQFSKDIEKLLNEQVNKEMQSSNLYMSMSSWCYTHSLDGAGLFLFDHAAEEYEHAKKLIIFLNENNVPVQLTSISAPEHKFEGLTQIFQKAYEHEQHISESINNIVDHAIKSKDHATFNFLQWYVAEQHEEEVLFKDILDKIELIGNENHGLYLADQYVKGIAKSRKSGS

SEQ ID NO: 389 - protein, 1058 aa, synthetic construct
HHHHHHHHGPLEVLFQGPNITNLCPFDKVFNATRFPSVYAWERTKISDCVADYTVFYNSTSFSTFNCYGVSPSKLIDLCFTSVYADTFLIRFSEVRQVAPGQTGVIADYNYKLPDDFTGCVIAWNTAKQDVGSYFYRSHRSSKLKPFERDLSSEENGVRTLSTYDFNQYVPLEYQATRVVVLSFELLNAPATVCGPGSGGSGSSQCVNLTTRTQLPPAYTNSFTRGVYYPDKVFRSSVLHSTQDLFLPFFSNVTWFHAIHVSGTNGTKRFDNPVLPFNDGVYFASTEKSNIIRGWIFGTTLDSKTQSLLIVNNATNVVIKVCEFQFCNDPFLGVYYHKNNKSWMESEFRVYSSANNCTFEYVSQPFLMDLEGKQGNFKNLREFVFKNIDGYFKIYSKHTPINLVRDLPQGFSALEPLVDLPIGINITRFQTLLALHRSYLTPGDSSSGWTAGAAAYYVGYLQPRTFLLKYNENGTITDAVDCALDPLSETKCTLKSFTVEKGIYQTSNFRVQPTESIVRFPNITNLCPFGEVFNATRFASVYAWNRKRISNCVADYSVLYNSASFSTFKCYGVSPTKLNDLCFTNVYADSFVIRGDEVRQIAPGQTGKIADYNYKLPDDFTGCVIAWNSNNLDSKVGGNYNYLYRLFRKSNLKPFERDISTEIYQAGSTPCNGVEGFNCYFPLQSYGFQPTNGVGYQPYRVVVLSFELLHAPATVCGPKKSTNLVKNKCVNFNFNGLTGTGVLTESNKKFLPFQQFGRDIADTTDAVRDPQTLEILDITPCSFGGVSVITPGTNTSNQVAVLYQDVNCTEVPVAIHADQLTPTWRVYSTGSNVFQTRAGCLIGAEHVNNSYECDIPIGAGICASYQTGGSQSIIAYTGSGGGGESQVRQQFSKDIEKLLNEQVNKEMQSSNLYMSMSSWCYTHSLDGAGLFLFDHAAEEYEHAKKLIIFLNENNVPVQLTSISAPEHKFEGLTQIFQKAYEHEQHISESINNIVDHAIKSKDHATFNFLQWYVAEQHEEEVLFKDILDKIELIGNENHGLYLADQYVKGIAKSRKSGS

SEQ ID NO: 390 - protein, 1058 aa, synthetic construct
HHHHHHHHGPLEVLFQGPNITNRCPFDKVFNATRFPNVYAWERTKISDCVADYTVLYNSTSFSTFKCYGVSPSKLIDLCFTSVYADTFLIRSSEVRQVAPGETGVIADYNYKLPDDFTGCVIAWNTAKQDQGQYYYRSHRKTKLKPFERDLSSDENGVRTLSTYDFYPSVPVAYQATRVVVLSFELLNAPATVCGPGSGGSGSSQCVNLTTRTQLPPAYTNSFTRGVYYPDKVFRSSVLHSTQDLFLPFFSNVTWFHAIHVSGTNGTKRFDNPVLPFNDGVYFASTEKSNIIRGWIFGTTLDSKTQSLLIVNNATNVVIKVCEFQFCNDPFLGVYYHKNNKSWMESEFRVYSSANNCTFEYVSQPFLMDLEGKQGNFKNLREFVFKNIDGYFKIYSKHTPINLVRDLPQGFSALEPLVDLPIGINITRFQTLLALHRSYLTPGDSSSGWTAGAAAYYVGYLQPRTFLLKYNENGTITDAVDCALDPLSETKCTLKSFTVEKGIYQTSNFRVQPTESIVRFPNITNLCPFGEVFNATRFASVYAWNRKRISNCVADYSVLYNSASFSTFKCYGVSPTKLNDLCFTNVYADSFVIRGDEVRQIAPGQTGKIADYNYKLPDDFTGCVIAWNSNNLDSKVGGNYNYLYRLFRKSNLKPFERDISTEIYQAGSTPCNGVEGFNCYFPLQSYGFQPTNGVGYQPYRVVVLSFELLHAPATVCGPKKSTNLVKNKCVNFNFNGLTGTGVLTESNKKFLPFQQFGRDIADTTDAVRDPQTLEILDITPCSFGGVSVITPGTNTSNQVAVLYQDVNCTEVPVAIHADQLTPTWRVYSTGSNVFQTRAGCLIGAEHVNNSYECDIPIGAGICASYQTGGSQSIIAYTGSGGGGESQVRQQFSKDIEKLLNEQVNKEMQSSNLYMSMSSWCYTHSLDGAGLFLFDHAAEEYEHAKKLIIFLNENNVPVQLTSISAPEHKFEGLTQIFQKAYEHEQHISESINNIVDHAIKSKDHATFNFLQWYVAEQHEEEVLFKDILDKIELIGNENHGLYLADQYVKGIAKSRKSGS

SEQ ID NO: 391 - protein, 1058 aa, synthetic construct
HHHHHHHHGPLEVLFQGPNITNRCPFDKVFNASRFPNVYAWERTKISDCVADYTVLYNSTSFSTFKCYGVSPSKLIDLCFTSVYADTFLIRSSEVRQVAPGETGVIADYNYKLPDDFTGCVIAWNTAKQDQGQYYYRSSRKTKLKPFERDLTSDENGVRTLSTYDFYPNVPIEYQATRVVVLSFELLNAPATVCGPGSGGSGSSQCVNLTTRTQLPPAYTNSFTRGVYYPDKVFRSSVLHSTQDLFLPFFSNVTWFHAIHVSGTNGTKRFDNPVLPFNDGVYFASTEKSNIIRGWIFGTTLDSKTQSLLIVNNATNVVIKVCEFQFCNDPFLGVYYHKNNKSWMESEFRVYSSANNCTFEYVSQPFLMDLEGKQGNFKNLREFVFKNIDGYFKIYSKHTPINLVRDLPQGFSALEPLVDLPIGINITRFQTLLALHRSYLTPGDSSSGWTAGAAAYYVGYLQPRTFLLKYNENGTITDAVDCALDPLSETKCTLKSFTVEKGIYQTSNFRVQPTESIVRFPNITNLCPFGEVFNATRFASVYAWNRKRISNCVADYSVLYNSASFSTFKCYGVSPTKLNDLCFTNVYADSFVIRGDEVRQIAPGQTGKIADYNYKLPDDFTGCVIAWNSNNLDSKVGGNYNYLYRLFRKSNLKPFERDISTEIYQAGSTPCNGVEGFNCYFPLQSYGFQPTNGVGYQPYRVVVLSFELLHAPATVCGPKKSTNLVKNKCVNFNFNGLTGTGVLTESNKKFLPFQQFGRDIADTTDAVRDPQTLEILDITPCSFGGVSVITPGTNTSNQVAVLYQDVNCTEVPVAIHADQLTPTWRVYSTGSNVFQTRAGCLIGAEHVNNSYECDIPIGAGICASYQTGGSQSIIAYTGSGGGGESQVRQQFSKDIEKLLNEQVNKEMQSSNLYMSMSSWCYTHSLDGAGLFLFDHAAEEYEHAKKLIIFLNENNVPVQLTSISAPEHKFEGLTQIFQKAYEHEQHISESINNIVDHAIKSKDHATFNFLQWYVAEQHEEEVLFKDILDKIELIGNENHGLYLADQYVKGIAKSRKSGS

SEQ ID NO: 392 - protein, 1073 aa, synthetic construct
HHHHHHHHGPLEVLFQGPNITNLCPFSQVFNATRFPSVYAWTRERISNCIADYSVLYNSTSFSTFRCYGVSPTKLNDLCFSNVYADSMVVRGDEVRQIAPSQTGVIADYNYKLPDDFTGCVIAWNSKAKDENGQYFYRLFRKSKLLPFQRDVSNVTYGSGKNDGCNPSEADCYWPLLKYGFTSSVSQDYQPYRVVVLSFELLNAPATVCGPGSGGSGSSQCVNLTTRTQLPPAYTNSFTRGVYYPDKVFRSSVLHSTQDLFLPFFSNVTWFHAIHVSGTNGTKRFDNPVLPFNDGVYFASTEKSNIIRGWIFGTTLDSKTQSLLIVNNATNVVIKVCEFQFCNDPFLGVYYHKNNKSWMESEFRVYSSANNCTFEYVSQPFLMDLEGKQGNFKNLREFVFKNIDGYFKIYSKHTPINLVRDLPQGFSALEPLVDLPIGINITRFQTLLALHRSYLTPGDSSSGWTAGAAAYYVGYLQPRTFLLKYNENGTITDAVDCALDPLSETKCTLKSFTVEKGIYQTSNFRVQPTESIVRFPNITNLCPFGEVFNATRFASVYAWNRKRISNCVADYSVLYNSASFSTFKCYGVSPTKLNDLCFTNVYADSFVIRGDEVRQIAPGQTGKIADYNYKLPDDFTGCVIAWNSNNLDSKVGGNYNYLYRLFRKSNLKPFERDISTEIYQAGSTPCNGVEGFNCYFPLQSYGFQPTNGVGYQPYRVVVLSFELLHAPATVCGPKKSTNLVKNKCVNFNFNGLTGTGVLTESNKKFLPFQQFGRDIADTTDAVRDPQTLEILDITPCSFGGVSVITPGTNTSNQVAVLYQDVNCTEVPVAIHADQLTPTWRVYSTGSNVFQTRAGCLIGAEHVNNSYECDIPIGAGICASYQTGGSQSIIAYTGSGGGGESQVRQQFSKDIEKLLNEQVNKEMQSSNLYMSMSSWCYTHSLDGAGLFLFDHAAEEYEHAKKLIIFLNENNVPVQLTSISAPEHKFEGLTQIFQKAYEHEQHISESINNIVDHAIKSKDHATFNFLQWYVAEQHEEEVLFKDILDKIELIGNENHGLYLADQYVKGIAKSRKSGS

SEQ ID NO: 393 - protein, 1073 aa, synthetic construct
HHHHHHHHGPLEVLFQGPNITNLCPFSQVFNATRFPSVYAWTRERISNCIADYSVLYNSTSFSTFRCYGVSPTKLNDLCFSNVYADSMVVRGDEVRQIAPSQTGVIADYNYKLPDDFTGCVIAWNSKAKDENGQYFYRLFRKSKLLPFQRDVSNVTYGSGKNDGCNPSEADCYWPLLKYGFWSSVSQDYQPYRVVVLSFELLNAPATVCGPGSGGSGSSQCVNLTTRTQLPPAYTNSFTRGVYYPDKVFRSSVLHSTQDLFLPFFSNVTWFHAIHVSGTNGTKRFDNPVLPFNDGVYFASTEKSNIIRGWIFGTTLDSKTQSLLIVNNATNVVIKVCEFQFCNDPFLGVYYHKNNKSWMESEFRVYSSANNCTFEYVSQPFLMDLEGKQGNFKNLREFVFKNIDGYFKIYSKHTPINLVRDLPQGFSALEPLVDLPIGINITRFQTLLALHRSYLTPGDSSSGWTAGAAAYYVGYLQPRTFLLKYNENGTITDAVDCALDPLSETKCTLKSFTVEKGIYQTSNFRVQPTESIVRFPNITNLCPFGEVFNATRFASVYAWNRKRISNCVADYSVLYNSASFSTFKCYGVSPTKLNDLCFTNVYADSFVIRGDEVRQIAPGQTGKIADYNYKLPDDFTGCVIAWNSNNLDSKVGGNYNYLYRLFRKSNLKPFERDISTEIYQAGSTPCNGVEGFNCYFPLQSYGFQPTNGVGYQPYRVVVLSFELLHAPATVCGPKKSTNLVKNKCVNFNFNGLTGTGVLTESNKKFLPFQQFGRDIADTTDAVRDPQTLEILDITPCSFGGVSVITPGTNTSNQVAVLYQDVNCTEVPVAIHADQLTPTWRVYSTGSNVFQTRAGCLIGAEHVNNSYECDIPIGAGICASYQTGGSQSIIAYTGSGGGGESQVRQQFSKDIEKLLNEQVNKEMQSSNLYMSMSSWCYTHSLDGAGLFLFDHAAEEYEHAKKLIIFLNENNVPVQLTSISAPEHKFEGLTQIFQKAYEHEQHISESINNIVDHAIKSKDHATFNFLQWYVAEQHEEEVLFKDILDKIELIGNENHGLYLADQYVKGIAKSRKSGS

SEQ ID NO: 394 - protein, 1073 aa, synthetic construct
HHHHHHHHGPLEVLFQGPNITNLCPFSQVFNATRFPSVYAWTRERISNCIADYSVLYNSTSFSTFRCYGVSPTKLNDLCFSNVYADSMVVRGDEVRQIAPSQTGVIADYNYKLPDDFTGCVIAWNSKAKDENGQYFYRLFRKSKLLPFQRDVSNVTYGSGKNDGCNPSEADCYWPLYKYGFWSSVSQDYQPYRVVVLSFELLNAPATVCGPGSGGSGSSQCVNLTTRTQLPPAYTNSFTRGVYYPDKVFRSSVLHSTQDLFLPFFSNVTWFHAIHVSGTNGTKRFDNPVLPFNDGVYFASTEKSNIIRGWIFGTTLDSKTQSLLIVNNATNVVIKVCEFQFCNDPFLGVYYHKNNKSWMESEFRVYSSANNCTFEYVSQPFLMDLEGKQGNFKNLREFVFKNIDGYFKIYSKHTPINLVRDLPQGFSALEPLVDLPIGINITRFQTLLALHRSYLTPGDSSSGWTAGAAAYYVGYLQPRTFLLKYNENGTITDAVDCALDPLSETKCTLKSFTVEKGIYQTSNFRVQPTESIVRFPNITNLCPFGEVFNATRFASVYAWNRKRISNCVADYSVLYNSASFSTFKCYGVSPTKLNDLCFTNVYADSFVIRGDEVRQIAPGQTGKIADYNYKLPDDFTGCVIAWNSNNLDSKVGGNYNYLYRLFRKSNLKPFERDISTEIYQAGSTPCNGVEGFNCYFPLQSYGFQPTNGVGYQPYRVVVLSFELLHAPATVCGPKKSTNLVKNKCVNFNFNGLTGTGVLTESNKKFLPFQQFGRDIADTTDAVRDPQTLEILDITPCSFGGVSVITPGTNTSNQVAVLYQDVNCTEVPVAIHADQLTPTWRVYSTGSNVFQTRAGCLIGAEHVNNSYECDIPIGAGICASYQTGGSQSIIAYTGSGGGGESQVRQQFSKDIEKLLNEQVNKEMQSSNLYMSMSSWCYTHSLDGAGLFLFDHAAEEYEHAKKLIIFLNENNVPVQLTSISAPEHKFEGLTQIFQKAYEHEQHISESINNIVDHAIKSKDHATFNFLQWYVAEQHEEEVLFKDILDKIELIGNENHGLYLADQYVKGIAKSRKSGS

SEQ ID NO: 395 - protein, 1074 aa, synthetic construct
HHHHHHHHGPLEVLFQGPNMTNICPFDQVFNKTQFPSVYAWERVRISDCVSDYTVLYNSSASFSTFKCYGVSPTKLNDLCFSGVYADYFVVKGDHVHQIAPGQTGVIADYNYKLPSEFVGCILAWNTRTIDSKRGFYYRLFRHGNIRPYERDTSNVPYNAAGGTCNQPGTHNCYEPLQDYGFTSTSGVGYQPFRVVVLSFELLNAPATVCGPGSGGSGSSQCVNLTTRTQLPPAYTNSFTRGVYYPDKVFRSSVLHSTQDLFLPFFSNVTWFHAIHVSGTNGTKRFDNPVLPFNDGVYFASTEKSNIIRGWIFGTTLDSKTQSLLIVNNATNVVIKVCEFQFCNDPFLGVYYHKNNKSWMESEFRVYSSANNCTFEYVSQPFLMDLEGKQGNFKNLREFVFKNIDGYFKIYSKHTPINLVRDLPQGFSALEPLVDLPIGINITRFQTLLALHRSYLTPGDSSSGWTAGAAAYYVGYLQPRTFLLKYNENGTITDAVDCALDPLSETKCTLKSFTVEKGIYQTSNFRVQPTESIVRFPNITNLCPFGEVFNATRFASVYAWNRKRISNCVADYSVLYNSASFSTFKCYGVSPTKLNDLCFTNVYADSFVIRGDEVRQIAPGQTGKIADYNYKLPDDFTGCVIAWNSNNLDSKVGGNYNYLYRLFRKSNLKPFERDISTEIYQAGSTPCNGVEGFNCYFPLQSYGFQPTNGVGYQPYRVVVLSFELLHAPATVCGPKKSTNLVKNKCVNFNFNGLTGTGVLTESNKKFLPFQQFGRDIADTTDAVRDPQTLEILDITPCSFGGVSVITPGTNTSNQVAVLYQDVNCTEVPVAIHADQLTPTWRVYSTGSNVFQTRAGCLIGAEHVNNSYECDIPIGAGICASYQTGGSQSIIAYTGSGGGGESQVRQQFSKDIEKLLNEQVNKEMQSSNLYMSMSSWCYTHSLDGAGLFLFDHAAEEYEHAKKLIIFLNENNVPVQLTSISAPEHKFEGLTQIFQKAYEHEQHISESINNIVDHAIKSKDHATFNFLQWYVAEQHEEEVLFKDILDKIELIGNENHGLYLADQYVKGIAKSRKSGS

SEQ ID NO: 396 - protein, 1074 aa, synthetic construct
HHHHHHHHGPLEVLFQGPNMTNICPFDQVFNKTQFPSVYAWERVRISDCVSDYTVLYNSSASFSTFKCYGVSPTKLNDLCFSGVYADYFVVKGDHVHQIAPGQTGVIADYNYKLPSEFVGCILAWNTRTIDSKRGFYYRLFRHGNIRPYERDTSNVPYNAAGGTCNQPGTHNCYEPLQDYGFWSTSGVGYQPFRVVVLSFELLNAPATVCGPGSGGSGSSQCVNLTTRTQLPPAYTNSFTRGVYYPDKVFRSSVLHSTQDLFLPFFSNVTWFHAIHVSGTNGTKRFDNPVLPFNDGVYFASTEKSNIIRGWIFGTTLDSKTQSLLIVNNATNVVIKVCEFQFCNDPFLGVYYHKNNKSWMESEFRVYSSANNCTFEYVSQPFLMDLEGKQGNFKNLREFVFKNIDGYFKIYSKHTPINLVRDLPQGFSALEPLVDLPIGINITRFQTLLALHRSYLTPGDSSSGWTAGAAAYYVGYLQPRTFLLKYNENGTITDAVDCALDPLSETKCTLKSFTVEKGIYQTSNFRVQPTESIVRFPNITNLCPFGEVFNATRFASVYAWNRKRISNCVADYSVLYNSASFSTFKCYGVSPTKLNDLCFTNVYADSFVIRGDEVRQIAPGQTGKIADYNYKLPDDFTGCVIAWNSNNLDSKVGGNYNYLYRLFRKSNLKPFERDISTEIYQAGSTPCNGVEGFNCYFPLQSYGFQPTNGVGYQPYRVVVLSFELLHAPATVCGPKKSTNLVKNKCVNFNFNGLTGTGVLTESNKKFLPFQQFGRDIADTTDAVRDPQTLEILDITPCSFGGVSVITPGTNTSNQVAVLYQDVNCTEVPVAIHADQLTPTWRVYSTGSNVFQTRAGCLIGAEHVNNSYECDIPIGAGICASYQTGGSQSIIAYTGSGGGGESQVRQQFSKDIEKLLNEQVNKEMQSSNLYMSMSSWCYTHSLDGAGLFLFDHAAEEYEHAKKLIIFLNENNVPVQLTSISAPEHKFEGLTQIFQKAYEHEQHISESINNIVDHAIKSKDHATFNFLQWYVAEQHEEEVLFKDILDKIELIGNENHGLYLADQYVKGIAKSRKSGS

SEQ ID NO: 397 - protein, 1074 aa, synthetic construct
HHHHHHHHGPLEVLFQGPNMTNICPFDQVFNKTQFPSVYAWERVRISDCVSDYTVLYNSSASFSTFKCYGVSPTKLNDLCFSGVYADYFVVKGDHVHQIAPGQTGVIADYNYKLPSEFVGCILAWNTRTIDSKRGFYYRLFRHGNIRPYERDTSNVPYNAAGGTCNQPGTHNCYEPLYDYGFWSTSGVGYQPFRVVVLSFELLNAPATVCGPGSGGSGSSQCVNLTTRTQLPPAYTNSFTRGVYYPDKVFRSSVLHSTQDLFLPFFSNVTWFHAIHVSGTNGTKRFDNPVLPFNDGVYFASTEKSNIIRGWIFGTTLDSKTQSLLIVNNATNVVIKVCEFQFCNDPFLGVYYHKNNKSWMESEFRVYSSANNCTFEYVSQPFLMDLEGKQGNFKNLREFVFKNIDGYFKIYSKHTPINLVRDLPQGFSALEPLVDLPIGINITRFQTLLALHRSYLTPGDSSSGWTAGAAAYYVGYLQPRTFLLKYNENGTITDAVDCALDPLSETKCTLKSFTVEKGIYQTSNFRVQPTESIVRFPNITNLCPFGEVFNATRFASVYAWNRKRISNCVADYSVLYNSASFSTFKCYGVSPTKLNDLCFTNVYADSFVIRGDEVRQIAPGQTGKIADYNYKLPDDFTGCVIAWNSNNLDSKVGGNYNYLYRLFRKSNLKPFERDISTEIYQAGSTPCNGVEGFNCYFPLQSYGFQPTNGVGYQPYRVVVLSFELLHAPATVCGPKKSTNLVKNKCVNFNFNGLTGTGVLTESNKKFLPFQQFGRDIADTTDAVRDPQTLEILDITPCSFGGVSVITPGTNTSNQVAVLYQDVNCTEVPVAIHADQLTPTWRVYSTGSNVFQTRAGCLIGAEHVNNSYECDIPIGAGICASYQTGGSQSIIAYTGSGGGGESQVRQQFSKDIEKLLNEQVNKEMQSSNLYMSMSSWCYTHSLDGAGLFLFDHAAEEYEHAKKLIIFLNENNVPVQLTSISAPEHKFEGLTQIFQKAYEHEQHISESINNIVDHAIKSKDHATFNFLQWYVAEQHEEEVLFKDILDKIELIGNENHGLYLADQYVKGIAKSRKSGS

SEQ ID NO: 398 - protein, 1076 aa, synthetic construct
HHHHHHHHGPLEVLFQGPNITNLCPFGQVFNASNFPSVYAWERLRISDCVADYAVLYNSSSSFSTFKCYGVSPTKLNDLCFSSVYADYFVVKGDDVRQIAPAQTGVIADYNYKLPDDFTGCVLAWNTNSVDSKSGNNFYYRLFRHGKIKPYERDISNVLYNSAGGTCSSISQLGCYEPLKSYGFTPTVGVGYQPYRVVVLSFELLNAPATVCGPGSGGSGSSQCVNLTTRTQLPPAYTNSFTRGVYYPDKVFRSSVLHSTQDLFLPFFSNVTWFHAIHVSGTNGTKRFDNPVLPFNDGVYFASTEKSNIIRGWIFGTTLDSKTQSLLIVNNATNVVIKVCEFQFCNDPFLGVYYHKNNKSWMESEFRVYSSANNCTFEYVSQPFLMDLEGKQGNFKNLREFVFKNIDGYFKIYSKHTPINLVRDLPQGFSALEPLVDLPIGINITRFQTLLALHRSYLTPGDSSSGWTAGAAAYYVGYLQPRTFLLKYNENGTITDAVDCALDPLSETKCTLKSFTVEKGIYQTSNFRVQPTESIVRFPNITNLCPFGEVFNATRFASVYAWNRKRISNCVADYSVLYNSASFSTFKCYGVSPTKLNDLCFTNVYADSFVIRGDEVRQIAPGQTGKIADYNYKLPDDFTGCVIAWNSNNLDSKVGGNYNYLYRLFRKSNLKPFERDISTEIYQAGSTPCNGVEGFNCYFPLQSYGFQPTNGVGYQPYRVVVLSFELLHAPATVCGPKKSTNLVKNKCVNFNFNGLTGTGVLTESNKKFLPFQQFGRDIADTTDAVRDPQTLEILDITPCSFGGVSVITPGTNTSNQVAVLYQDVNCTEVPVAIHADQLTPTWRVYSTGSNVFQTRAGCLIGAEHVNNSYECDIPIGAGICASYQTGGSQSIIAYTGSGGGGESQVRQQFSKDIEKLLNEQVNKEMQSSNLYMSMSSWCYTHSLDGAGLFLFDHAAEEYEHAKKLIIFLNENNVPVQLTSISAPEHKFEGLTQIFQKAYEHEQHISESINNIVDHAIKSKDHATFNFLQWYVAEQHEEEVLFKDILDKIELIGNENHGLYLADQYVKGIAKSRKSGS

SEQ ID NO: 399 - protein, 1076 aa, synthetic construct
HHHHHHHHGPLEVLFQGPNITNLCPFGQVFNASNFPSVYAWERLRISDCVADYAVLYNSSSSFSTFKCYGVSPTKLNDLCFSSVYADYFVVKGDDVRQIAPAQTGVIADYNYKLPDDFTGCVLAWNTNSVDSKSGNNFYYRLFRHGKIKPYERDISNVLYNSAGGTCSSISQLGCYEPLKSYGFWPTVGVGYQPYRVVVLSFELLNAPATVCGPGSGGSGSSQCVNLTTRTQLPPAYTNSFTRGVYYPDKVFRSSVLHSTQDLFLPFFSNVTWFHAIHVSGTNGTKRFDNPVLPFNDGVYFASTEKSNIIRGWIFGTTLDSKTQSLLIVNNATNVVIKVCEFQFCNDPFLGVYYHKNNKSWMESEFRVYSSANNCTFEYVSQPFLMDLEGKQGNFKNLREFVFKNIDGYFKIYSKHTPINLVRDLPQGFSALEPLVDLPIGINITRFQTLLALHRSYLTPGDSSSGWTAGAAAYYVGYLQPRTFLLKYNENGTITDAVDCALDPLSETKCTLKSFTVEKGIYQTSNFRVQPTESIVRFPNITNLCPFGEVFNATRFASVYAWNRKRISNCVADYSVLYNSASFSTFKCYGVSPTKLNDLCFTNVYADSFVIRGDEVRQIAPGQTGKIADYNYKLPDDFTGCVIAWNSNNLDSKVGGNYNYLYRLFRKSNLKPFERDISTEIYQAGSTPCNGVEGFNCYFPLQSYGFQPTNGVGYQPYRVVVLSFELLHAPATVCGPKKSTNLVKNKCVNFNFNGLTGTGVLTESNKKFLPFQQFGRDIADTTDAVRDPQTLEILDITPCSFGGVSVITPGTNTSNQVAVLYQDVNCTEVPVAIHADQLTPTWRVYSTGSNVFQTRAGCLIGAEHVNNSYECDIPIGAGICASYQTGGSQSIIAYTGSGGGGESQVRQQFSKDIEKLLNEQVNKEMQSSNLYMSMSSWCYTHSLDGAGLFLFDHAAEEYEHAKKLIIFLNENNVPVQLTSISAPEHKFEGLTQIFQKAYEHEQHISESINNIVDHAIKSKDHATFNFLQWYVAEQHEEEVLFKDILDKIELIGNENHGLYLADQYVKGIAKSRKSGS

SEQ ID NO: 400 - protein, 1076 aa, synthetic construct
HHHHHHHHGPLEVLFQGPNITNLCPFGQVFNASNFPSVYAWERLRISDCVADYAVLYNSSSSFSTFKCYGVSPTKLNDLCFSSVYADYFVVKGDDVRQIAPAQTGVIADYNYKLPDDFTGCVLAWNTNSVDSKSGNNFYYRLFRHGKIKPYERDISNVLYNSAGGTCSSISQLGCYEPLYSYGFWPTVGVGYQPYRVVVLSFELLNAPATVCGPGSGGSGSSQCVNLTTRTQLPPAYTNSFTRGVYYPDKVFRSSVLHSTQDLFLPFFSNVTWFHAIHVSGTNGTKRFDNPVLPFNDGVYFASTEKSNIIRGWIFGTTLDSKTQSLLIVNNATNVVIKVCEFQFCNDPFLGVYYHKNNKSWMESEFRVYSSANNCTFEYVSQPFLMDLEGKQGNFKNLREFVFKNIDGYFKIYSKHTPINLVRDLPQGFSALEPLVDLPIGINITRFQTLLALHRSYLTPGDSSSGWTAGAAAYYVGYLQPRTFLLKYNENGTITDAVDCALDPLSETKCTLKSFTVEKGIYQTSNFRVQPTESIVRFPNITNLCPFGEVFNATRFASVYAWNRKRISNCVADYSVLYNSASFSTFKCYGVSPTKLNDLCFTNVYADSFVIRGDEVRQIAPGQTGKIADYNYKLPDDFTGCVIAWNSNNLDSKVGGNYNYLYRLFRKSNLKPFERDISTEIYQAGSTPCNGVEGFNCYFPLQSYGFQPTNGVGYQPYRVVVLSFELLHAPATVCGPKKSTNLVKNKCVNFNFNGLTGTGVLTESNKKFLPFQQFGRDIADTTDAVRDPQTLEILDITPCSFGGVSVITPGTNTSNQVAVLYQDVNCTEVPVAIHADQLTPTWRVYSTGSNVFQTRAGCLIGAEHVNNSYECDIPIGAGICASYQTGGSQSIIAYTGSGGGGESQVRQQFSKDIEKLLNEQVNKEMQSSNLYMSMSSWCYTHSLDGAGLFLFDHAAEEYEHAKKLIIFLNENNVPVQLTSISAPEHKFEGLTQIFQKAYEHEQHISESINNIVDHAIKSKDHATFNFLQWYVAEQHEEEVLFKDILDKIELIGNENHGLYLADQYVKGIAKSRKSGS

SEQ ID NO: 401 - protein, 1073 aa, synthetic construct
HHHHHHHHGPLEVLFQGPNITNLCPFSQVFNATRFPSVYAWTRERISNCIADYSVLYNSTSFSTFRCYGVSPTKLNDLCFSNVYADSMVVRGDEVRQIAPSQTGVIADYNYKLPDDFTGCVIAWNSKAKDENGQYFYRLFRKSKLLPFQRDVSNVTYGSGKNDGCNPSEADCYWPLLKYGFTGSVSQDYQPYRVVVLSFELLNAPATVCGPGSGGSGSSQCVNLTTRTQLPPAYTNSFTRGVYYPDKVFRSSVLHSTQDLFLPFFSNVTWFHAIHVSGTNGTKRFDNPVLPFNDGVYFASTEKSNIIRGWIFGTTLDSKTQSLLIVNNATNVVIKVCEFQFCNDPFLGVYYHKNNKSWMESEFRVYSSANNCTFEYVSQPFLMDLEGKQGNFKNLREFVFKNIDGYFKIYSKHTPINLVRDLPQGFSALEPLVDLPIGINITRFQTLLALHRSYLTPGDSSSGWTAGAAAYYVGYLQPRTFLLKYNENGTITDAVDCALDPLSETKCTLKSFTVEKGIYQTSNFRVQPTESIVRFPNITNLCPFGEVFNATRFASVYAWNRKRISNCVADYSVLYNSASFSTFKCYGVSPTKLNDLCFTNVYADSFVIRGDEVRQIAPGQTGKIADYNYKLPDDFTGCVIAWNSNNLDSKVGGNYNYLYRLFRKSNLKPFERDISTEIYQAGSTPCNGVEGFNCYFPLQSYGFQPTNGVGYQPYRVVVLSFELLHAPATVCGPKKSTNLVKNKCVNFNFNGLTGTGVLTESNKKFLPFQQFGRDIADTTDAVRDPQTLEILDITPCSFGGVSVITPGTNTSNQVAVLYQDVNCTEVPVAIHADQLTPTWRVYSTGSNVFQTRAGCLIGAEHVNNSYECDIPIGAGICASYQTGGSQSIIAYTGSGGGGESQVRQQFSKDIEKLLNEQVNKEMQSSNLYMSMSSWCYTHSLDGAGLFLFDHAAEEYEHAKKLIIFLNENNVPVQLTSISAPEHKFEGLTQIFQKAYEHEQHISESINNIVDHAIKSKDHATFNFLQWYVAEQHEEEVLFKDILDKIELIGNENHGLYLADQYVKGIAKSRKSGS

SEQ ID NO: 402 - protein, 1059 aa, synthetic construct
HHHHHHHHGPLEVLFQGPNITNRCPFDKVFNATRFPNVYAWERTKISDCVADYTVLYNSTSFSTFKCYGVSPSKLIDLCFTSVYADTFLIRSSEVRQVAPGETGVIADYNYKLPDDFTGCVIAWNTAKHDTGNYYYRSHRKTKLKPFERDLSSDDGNGVYTLSTYDFNPNVPVAYQATRVVVLSFELLNAPATVCGPGSGGSGSSQCVNLTTRTQLPPAYTNSFTRGVYYPDKVFRSSVLHSTQDLFLPFFSNVTWFHAIHVSGTNGTKRFDNPVLPFNDGVYFASTEKSNIIRGWIFGTTLDSKTQSLLIVNNATNVVIKVCEFQFCNDPFLGVYYHKNNKSWMESEFRVYSSANNCTFEYVSQPFLMDLEGKQGNFKNLREFVFKNIDGYFKIYSKHTPINLVRDLPQGFSALEPLVDLPIGINITRFQTLLALHRSYLTPGDSSSGWTAGAAAYYVGYLQPRTFLLKYNENGTITDAVDCALDPLSETKCTLKSFTVEKGIYQTSNFRVQPTESIVRFPNITNLCPFGEVFNATRFASVYAWNRKRISNCVADYSVLYNSASFSTFKCYGVSPTKLNDLCFTNVYADSFVIRGDEVRQIAPGQTGKIADYNYKLPDDFTGCVIAWNSNNLDSKVGGNYNYLYRLFRKSNLKPFERDISTEIYQAGSTPCNGVEGFNCYFPLQSYGFQPTNGVGYQPYRVVVLSFELLHAPATVCGPKKSTNLVKNKCVNFNFNGLTGTGVLTESNKKFLPFQQFGRDIADTTDAVRDPQTLEILDITPCSFGGVSVITPGTNTSNQVAVLYQDVNCTEVPVAIHADQLTPTWRVYSTGSNVFQTRAGCLIGAEHVNNSYECDIPIGAGICASYQTGGSQSIIAYTGSGGGGESQVRQQFSKDIEKLLNEQVNKEMQSSNLYMSMSSWCYTHSLDGAGLFLFDHAAEEYEHAKKLIIFLNENNVPVQLTSISAPEHKFEGLTQIFQKAYEHEQHISESINNIVDHAIKSKDHATFNFLQWYVAEQHEEEVLFKDILDKIELIGNENHGLYLADQYVKGIAKSRKSGS

SEQ ID NO: 403 - protein, 1074 aa, synthetic construct
HHHHHHHHGPLEVLFQGPNVTQLCPFSDVFNRTMFPSVYAWERMSIRDCVADYAVLYNSSISFSTFECYGVSPTKLNDLCFSSVYADYFVVRGDDVKQIAPGKTGVIADYNYKLPDDFVGCVLAWNSRHVDNKQGFYYRLFRHGKIKPYQRDMSRELYSPSGTPCTVVGFNCYDPLAHYAFASPGIGIGYQPFRVVVLSFQLLNAPATVCGPGSGGSGSSQCVNLTTRTQLPPAYTNSFTRGVYYPDKVFRSSVLHSTQDLFLPFFSNVTWFHAIHVSGTNGTKRFDNPVLPFNDGVYFASTEKSNIIRGWIFGTTLDSKTQSLLIVNNATNVVIKVCEFQFCNDPFLGVYYHKNNKSWMESEFRVYSSANNCTFEYVSQPFLMDLEGKQGNFKNLREFVFKNIDGYFKIYSKHTPINLVRDLPQGFSALEPLVDLPIGINITRFQTLLALHRSYLTPGDSSSGWTAGAAAYYVGYLQPRTFLLKYNENGTITDAVDCALDPLSETKCTLKSFTVEKGIYQTSNFRVQPTESIVRFPNITNLCPFGEVFNATRFASVYAWNRKRISNCVADYSVLYNSASFSTFKCYGVSPTKLNDLCFTNVYADSFVIRGDEVRQIAPGQTGKIADYNYKLPDDFTGCVIAWNSNNLDSKVGGNYNYLYRLFRKSNLKPFERDISTEIYQAGSTPCNGVEGFNCYFPLQSYGFQPTNGVGYQPYRVVVLSFELLHAPATVCGPKKSTNLVKNKCVNFNFNGLTGTGVLTESNKKFLPFQQFGRDIADTTDAVRDPQTLEILDITPCSFGGVSVITPGTNTSNQVAVLYQDVNCTEVPVAIHADQLTPTWRVYSTGSNVFQTRAGCLIGAEHVNNSYECDIPIGAGICASYQTGGSQSIIAYTGSGGGGESQVRQQFSKDIEKLLNEQVNKEMQSSNLYMSMSSWCYTHSLDGAGLFLFDHAAEEYEHAKKLIIFLNENNVPVQLTSISAPEHKFEGLTQIFQKAYEHEQHISESINNIVDHAIKSKDHATFNFLQWYVAEQHEEEVLFKDILDKIELIGNENHGLYLADQYVKGIAKSRKSGS

SEQ ID NO: 404 - protein, 1076 aa, synthetic construct
HHHHHHHHGPLEVLFQGPNITNLCPFDEVFNATRFPSVYAWERKKISNCVADYSVLYNSTSFSTFKCYGVSPSKLNDLCFTSVYADSFVIRGDEVRQIAPGQTGVIADYNYKLPDDFTGCVIAWNTANQDSGEGGNPNYYYRSSRKSKLKPFERDLSSDEYNVGSQPCNRMGPNCYRTLSTYDFYPTVGVGYQPYRVVVLSFELLNAPATVCGPGSGGSGSSQCVNLTTRTQLPPAYTNSFTRGVYYPDKVFRSSVLHSTQDLFLPFFSNVTWFHAIHVSGTNGTKRFDNPVLPFNDGVYFASTEKSNIIRGWIFGTTLDSKTQSLLIVNNATNVVIKVCEFQFCNDPFLGVYYHKNNKSWMESEFRVYSSANNCTFEYVSQPFLMDLEGKQGNFKNLREFVFKNIDGYFKIYSKHTPINLVRDLPQGFSALEPLVDLPIGINITRFQTLLALHRSYLTPGDSSSGWTAGAAAYYVGYLQPRTFLLKYNENGTITDAVDCALDPLSETKCTLKSFTVEKGIYQTSNFRVQPTESIVRFPNITNLCPFGEVFNATRFASVYAWNRKRISNCVADYSVLYNSASFSTFKCYGVSPTKLNDLCFTNVYADSFVIRGDEVRQIAPGQTGKIADYNYKLPDDFTGCVIAWNSNNLDSKVGGNYNYLYRLFRKSNLKPFERDISTEIYQAGSTPCNGVEGFNCYFPLQSYGFQPTNGVGYQPYRVVVLSFELLHAPATVCGPKKSTNLVKNKCVNFNFNGLTGTGVLTESNKKFLPFQQFGRDIADTTDAVRDPQTLEILDITPCSFGGVSVITPGTNTSNQVAVLYQDVNCTEVPVAIHADQLTPTWRVYSTGSNVFQTRAGCLIGAEHVNNSYECDIPIGAGICASYQTGGSQSIIAYTGSGGGGESQVRQQFSKDIEKLLNEQVNKEMQSSNLYMSMSSWCYTHSLDGAGLFLFDHAAEEYEHAKKLIIFLNENNVPVQLTSISAPEHKFEGLTQIFQKAYEHEQHISESINNIVDHAIKSKDHATFNFLQWYVAEQHEEEVLFKDILDKIELIGNENHGLYLADQYVKGIAKSRKSGS

SEQ ID NO: 405 - protein, 1163 aa, synthetic construct
HHHHHHHHGPLEVLFQGPNLPDCNIEEWLTAKSVPSPLNWERKTFSNCNFNLSSLLRFVQADSFSCNNIDASKVYGMCFGSISVDKFAIPNSRQVDLQLGNSGFLQSFNYKIDTTATSCQLYYSLPANNVTINNYNPSSWNRRYGFNDDTVFKPRPAGVLTNHDVVYSQQCFKVPNTFCPCKNNGSCVSSGKGTTNGSGTCPAGTNYRTCENTTWCACSCTPDPITASGPRKCPQKKSLVGVGEHCSGLGVDSDYCGNVSCLCSTDAFLGWSADSCLVNDRCNIFANIILNGINSGTTCSTGSGGSGSSQCVNLTTRTQLPPAYTNSFTRGVYYPDKVFRSSVLHSTQDLFLPFFSNVTWFHAIHVSGTNGTKRFDNPVLPFNDGVYFASTEKSNIIRGWIFGTTLDSKTQSLLIVNNATNVVIKVCEFQFCNDPFLGVYYHKNNKSWMESEFRVYSSANNCTFEYVSQPFLMDLEGKQGNFKNLREFVFKNIDGYFKIYSKHTPINLVRDLPQGFSALEPLVDLPIGINITRFQTLLALHRSYLTPGDSSSGWTAGAAAYYVGYLQPRTFLLKYNENGTITDAVDCALDPLSETKCTLKSFTVEKGIYQTSNFRVQPTESIVRFPNITNLCPFGEVFNATRFASVYAWNRKRISNCVADYSVLYNSASFSTFKCYGVSPTKLNDLCFTNVYADSFVIRGDEVRQIAPGQTGKIADYNYKLPDDFTGCVIAWNSNNLDSKVGGNYNYLYRLFRKSNLKPFERDISTEIYQAGSTPCNGVEGFNCYFPLQSYGFQPTNGVGYQPYRVVVLSFELLHAPATVCGPKKSTNLVKNKCVNFNFNGLTGTGVLTESNKKFLPFQQFGRDIADTTDAVRDPQTLEILDITPCSFGGVSVITPGTNTSNQVAVLYQDVNCTEVPVAIHADQLTPTWRVYSTGSNVFQTRAGCLIGAEHVNNSYECDIPIGAGICASYQTGGSQSIIAYTGSGGGGESQVRQQFSKDIEKLLNEQVNKEMQSSNLYMSMSSWCYTHSLDGAGLFLFDHAAEEYEHAKKLIIFLNENNVPVQLTSISAPEHKFEGLTQIFQKAYEHEQHISESINNIVDHAIKSKDHATFNFLQWYVAEQHEEEVLFKDILDKIELIGNENHGLYLADQYVKGIAKSRKSGS

SEQ ID NO: 406 - protein, 1089 aa, synthetic construct
HHHHHHHHGPLEVLFQGPQGVECDFSKLFKAAAPQIYNFSRLVFTNCNYNLTKLLSLFQVDEFSCHQISPSALASGCYSSLTVDYFAYPLSMKSYLQIGSAGEISQFNYKQDFSNPTCRILASVPANVSITKPDKYIYISQCYSLSAYSDVDVPHYVNPGQYTSIPCLYLTSSGFDEDGQYFRYNLTQFEGQNYLVATGVTVSMTDNLQMVFVITVQYGTDTNSVCPGSGGSGSSQCVNLTTRTQLPPAYTNSFTRGVYYPDKVFRSSVLHSTQDLFLPFFSNVTWFHAIHVSGTNGTKRFDNPVLPFNDGVYFASTEKSNIIRGWIFGTTLDSKTQSLLIVNNATNVVIKVCEFQFCNDPFLGVYYHKNNKSWMESEFRVYSSANNCTFEYVSQPFLMDLEGKQGNFKNLREFVFKNIDGYFKIYSKHTPINLVRDLPQGFSALEPLVDLPIGINITRFQTLLALHRSYLTPGDSSSGWTAGAAAYYVGYLQPRTFLLKYNENGTITDAVDCALDPLSETKCTLKSFTVEKGIYQTSNFRVQPTESIVRFPNITNLCPFGEVFNATRFASVYAWNRKRISNCVADYSVLYNSASFSTFKCYGVSPTKLNDLCFTNVYADSFVIRGDEVRQIAPGQTGKIADYNYKLPDDFTGCVIAWNSNNLDSKVGGNYNYLYRLFRKSNLKPFERDISTEIYQAGSTPCNGVEGFNCYFPLQSYGFQPTNGVGYQPYRVVVLSFELLHAPATVCGPKKSTNLVKNKCVNFNFNGLTGTGVLTESNKKFLPFQQFGRDIADTTDAVRDPQTLEILDITPCSFGGVSVITPGTNTSNQVAVLYQDVNCTEVPVAIHADQLTPTWRVYSTGSNVFQTRAGCLIGAEHVNNSYECDIPIGAGICASYQTGGSQSIIAYTGSGGGGESQVRQQFSKDIEKLLNEQVNKEMQSSNLYMSMSSWCYTHSLDGAGLFLFDHAAEEYEHAKKLIIFLNENNVPVQLTSISAPEHKFEGLTQIFQKAYEHEQHISESINNIVDHAIKSKDHATFNFLQWYVAEQHEEEVLFKDILDKIELIGNENHGLYLADQYVKGIAKSRKSGS

SEQ ID NO: 407 - protein, 1088 aa, synthetic construct
HHHHHHHHGPLEVLFQGPELTECDLDVLFKNDAPIIANYSRRVFTNCNYNLTKLLSLVQVDEFVCHKTTPEALATGCYSSLTVDWFALPFSMKSTLAIGSAEAISMFNYNQDYSNPTCRIHAAVTANVSTALNFTANANYAYISRCQGVDGKPILLQPGQMTNIACRSGVLARPSDADYFGYSFQGRNYYLGRKSYKPKTDEGDVQMVYVITPKYDKGPDTVCPLKGSGGSGSSQCVNLTTRTQLPPAYTNSFTRGVYYPDKVFRSSVLHSTQDLFLPFFSNVTWFHAIHVSGTNGTKRFDNPVLPFNDGVYFASTEKSNIIRGWIFGTTLDSKTQSLLIVNNATNVVIKVCEFQFCNDPFLGVYYHKNNKSWMESEFRVYSSANNCTFEYVSQPFLMDLEGKQGNFKNLREFVFKNIDGYFKIYSKHTPINLVRDLPQGFSALEPLVDLPIGINITRFQTLLALHRSYLTPGDSSSGWTAGAAAYYVGYLQPRTFLLKYNENGTITDAVDCALDPLSETKCTLKSFTVEKGIYQTSNFRVQPTESIVRFPNITNLCPFGEVFNATRFASVYAWNRKRISNCVADYSVLYNSASFSTFKCYGVSPTKLNDLCFTNVYADSFVIRGDEVRQIAPGQTGKIADYNYKLPDDFTGCVIAWNSNNLDSKVGGNYNYLYRLFRKSNLKPFERDISTEIYQAGSTPCNGVEGFNCYFPLQSYGFQPTNGVGYQPYRVVVLSFELLHAPATVCGPKKSTNLVKNKCVNFNFNGLTGTGVLTESNKKFLPFQQFGRDIADTTDAVRDPQTLEILDITPCSFGGVSVITPGTNTSNQVAVLYQDVNCTEVPVAIHADQLTPTWRVYSTGSNVFQTRAGCLIGAEHVNNSYECDIPIGAGICASYQTGGSQSIIAYTGSGGGGESQVRQQFSKDIEKLLNEQVNKEMQSSNLYMSMSSWCYTHSLDGAGLFLFDHAAEEYEHAKKLIIFLNENNVPVQLTSISAPEHKFEGLTQIFQKAYEHEQHISESINNIVDHAIKSKDHATFNFLQWYVAEQHEEEVLFKDILDKIELIGNENHGLYLADQYVKGIAKSRKSGS

SEQ ID NO: 408 - protein, 1084 aa, synthetic construct
HHHHHHHHGPLEVLFQGPVYPDCNFTELFRERAPTIMQYKREVFTRCNYNLSLLLSLVQVDEFVCDKITPEALATGCYSSLTVDWFAFPYAWKSYLAIGSADRIVRFNYNQDYSNPSCRIHSKVNSSIGISYAGAYSYITNCNYGATNKDDVVKPGGRASQQCITGALNSPTTGQLWAYNFGGVPYRVSRLTYTDHLSDPLDMVYVITVKYEPGAETVCPKQGSGGSGSSQCVNLTTRTQLPPAYTNSFTRGVYYPDKVFRSSVLHSTQDLFLPFFSNVTWFHAIHVSGTNGTKRFDNPVLPFNDGVYFASTEKSNIIRGWIFGTTLDSKTQSLLIVNNATNVVIKVCEFQFCNDPFLGVYYHKNNKSWMESEFRVYSSANNCTFEYVSQPFLMDLEGKQGNFKNLREFVFKNIDGYFKIYSKHTPINLVRDLPQGFSALEPLVDLPIGINITRFQTLLALHRSYLTPGDSSSGWTAGAAAYYVGYLQPRTFLLKYNENGTITDAVDCALDPLSETKCTLKSFTVEKGIYQTSNFRVQPTESIVRFPNITNLCPFGEVFNATRFASVYAWNRKRISNCVADYSVLYNSASFSTFKCYGVSPTKLNDLCFTNVYADSFVIRGDEVRQIAPGQTGKIADYNYKLPDDFTGCVIAWNSNNLDSKVGGNYNYLYRLFRKSNLKPFERDISTEIYQAGSTPCNGVEGFNCYFPLQSYGFQPTNGVGYQPYRVVVLSFELLHAPATVCGPKKSTNLVKNKCVNFNFNGLTGTGVLTESNKKFLPFQQFGRDIADTTDAVRDPQTLEILDITPCSFGGVSVITPGTNTSNQVAVLYQDVNCTEVPVAIHADQLTPTWRVYSTGSNVFQTRAGCLIGAEHVNNSYECDIPIGAGICASYQTGGSQSIIAYTGSGGGGESQVRQQFSKDIEKLLNEQVNKEMQSSNLYMSMSSWCYTHSLDGAGLFLFDHAAEEYEHAKKLIIFLNENNVPVQLTSISAPEHKFEGLTQIFQKAYEHEQHISESINNIVDHAIKSKDHATFNFLQWYVAEQHEEEVLFKDILDKIELIGNENHGLYLADQYVKGIAKSRKSGS

SEQ ID NO: 409 - protein, 1090 aa, synthetic construct
HHHHHHHHGPLEVLFQGPQATECDFSPMLTGVAPQVYNFKRLVFSNCNYNLTKLLSLFAVDEFSCNGISPDAIARGCYSTLTVDYFAYPLSMKSYIRPGSAGNIPLYNYKQSFANPTCRVMASVPANVTITKPDAYGYISKCSRLTGANQDVETPLYINPGEYSICRDFSPGGFSEDGQVFKRTLTQFEGGGLLIGVGTRVPMTDNLQMSFIIFVQYGTGTDSVCPMLGSGGSGSSQCVNLTTRTQLPPAYTNSFTRGVYYPDKVFRSSVLHSTQDLFLPFFSNVTWFHAIHVSGTNGTKRFDNPVLPFNDGVYFASTEKSNIIRGWIFGTTLDSKTQSLLIVNNATNVVIKVCEFQFCNDPFLGVYYHKNNKSWMESEFRVYSSANNCTFEYVSQPFLMDLEGKQGNFKNLREFVFKNIDGYFKIYSKHTPINLVRDLPQGFSALEPLVDLPIGINITRFQTLLALHRSYLTPGDSSSGWTAGAAAYYVGYLQPRTFLLKYNENGTITDAVDCALDPLSETKCTLKSFTVEKGIYQTSNFRVQPTESIVRFPNITNLCPFGEVFNATRFASVYAWNRKRISNCVADYSVLYNSASFSTFKCYGVSPTKLNDLCFTNVYADSFVIRGDEVRQIAPGQTGKIADYNYKLPDDFTGCVIAWNSNNLDSKVGGNYNYLYRLFRKSNLKPFERDISTEIYQAGSTPCNGVEGFNCYFPLQSYGFQPTNGVGYQPYRVVVLSFELLHAPATVCGPKKSTNLVKNKCVNFNFNGLTGTGVLTESNKKFLPFQQFGRDIADTTDAVRDPQTLEILDITPCSFGGVSVITPGTNTSNQVAVLYQDVNCTEVPVAIHADQLTPTWRVYSTGSNVFQTRAGCLIGAEHVNNSYECDIPIGAGICASYQTGGSQSIIAYTGSGGGGESQVRQQFSKDIEKLLNEQVNKEMQSSNLYMSMSSWCYTHSLDGAGLFLFDHAAEEYEHAKKLIIFLNENNVPVQLTSISAPEHKFEGLTQIFQKAYEHEQHISESINNIVDHAIKSKDHATFNFLQWYVAEQHEEEVLFKDILDKIELIGNENHGLYLADQYVKGIAKSRKSGS

SEQ ID NO: 410 - protein, 1081 aa, synthetic construct
HHHHHHHHGPLEVLFQGPQGVECDFSKLFKAAPPQIYNFSRLVFTNCNYNLTKLLSLFHVSEFSCHQVSPSALASGCYSSLTVDYFAYPLYLASYLQQGSTGEIAQYNYKQDFSNPTCRILASVPANVSIPKPDKYIWLSQCYSFSAYSGDIPHYVQPGQYTPCLYLTSSGFDKSYQTNRDMQNKMAATGVTSSMTDNLQMAFVISVQYGTDTNSVCPMGSGGSGSSQCVNLTTRTQLPPAYTNSFTRGVYYPDKVFRSSVLHSTQDLFLPFFSNVTWFHAIHVSGTNGTKRFDNPVLPFNDGVYFASTEKSNIIRGWIFGTTLDSKTQSLLIVNNATNVVIKVCEFQFCNDPFLGVYYHKNNKSWMESEFRVYSSANNCTFEYVSQPFLMDLEGKQGNFKNLREFVFKNIDGYFKIYSKHTPINLVRDLPQGFSALEPLVDLPIGINITRFQTLLALHRSYLTPGDSSSGWTAGAAAYYVGYLQPRTFLLKYNENGTITDAVDCALDPLSETKCTLKSFTVEKGIYQTSNFRVQPTESIVRFPNITNLCPFGEVFNATRFASVYAWNRKRISNCVADYSVLYNSASFSTFKCYGVSPTKLNDLCFTNVYADSFVIRGDEVRQIAPGQTGKIADYNYKLPDDFTGCVIAWNSNNLDSKVGGNYNYLYRLFRKSNLKPFERDISTEIYQAGSTPCNGVEGFNCYFPLQSYGFQPTNGVGYQPYRVVVLSFELLHAPATVCGPKKSTNLVKNKCVNFNFNGLTGTGVLTESNKKFLPFQQFGRDIADTTDAVRDPQTLEILDITPCSFGGVSVITPGTNTSNQVAVLYQDVNCTEVPVAIHADQLTPTWRVYSTGSNVFQTRAGCLIGAEHVNNSYECDIPIGAGICASYQTGGSQSIIAYTGSGGGGESQVRQQFSKDIEKLLNEQVNKEMQSSNLYMSMSSWCYTHSLDGAGLFLFDHAAEEYEHAKKLIIFLNENNVPVQLTSISAPEHKFEGLTQIFQKAYEHEQHISESINNIVDHAIKSKDHATFNFLQWYVAEQHEEEVLFKDILDKIELIGNENHGLYLADQYVKGIAKSRKSGS

SEQ ID NO: 411 - protein, 1081 aa, synthetic construct
HHHHHHHHGPLEVLFQGPQGVECDFSKLFKAAPPQIYNFSRLVFTNCNYNLTKLLSLFHVSEFSCHQVSPSALASGCYSSLTVDYFAYPLYLASYLQQGSTGEIAQYNYKQDFSNPTCRILASVPANVSIPKPDKYIWLSQCYSFSAYSGDVPHYVLPGQYTPCLYLTSSGFDNSYQTNRDFQNKMAATGVISSMTDNLQMAFVISVQYGTDTNSVCPMGSGGSGSSQCVNLTTRTQLPPAYTNSFTRGVYYPDKVFRSSVLHSTQDLFLPFFSNVTWFHAIHVSGTNGTKRFDNPVLPFNDGVYFASTEKSNIIRGWIFGTTLDSKTQSLLIVNNATNVVIKVCEFQFCNDPFLGVYYHKNNKSWMESEFRVYSSANNCTFEYVSQPFLMDLEGKQGNFKNLREFVFKNIDGYFKIYSKHTPINLVRDLPQGFSALEPLVDLPIGINITRFQTLLALHRSYLTPGDSSSGWTAGAAAYYVGYLQPRTFLLKYNENGTITDAVDCALDPLSETKCTLKSFTVEKGIYQTSNFRVQPTESIVRFPNITNLCPFGEVFNATRFASVYAWNRKRISNCVADYSVLYNSASFSTFKCYGVSPTKLNDLCFTNVYADSFVIRGDEVRQIAPGQTGKIADYNYKLPDDFTGCVIAWNSNNLDSKVGGNYNYLYRLFRKSNLKPFERDISTEIYQAGSTPCNGVEGFNCYFPLQSYGFQPTNGVGYQPYRVVVLSFELLHAPATVCGPKKSTNLVKNKCVNFNFNGLTGTGVLTESNKKFLPFQQFGRDIADTTDAVRDPQTLEILDITPCSFGGVSVITPGTNTSNQVAVLYQDVNCTEVPVAIHADQLTPTWRVYSTGSNVFQTRAGCLIGAEHVNNSYECDIPIGAGICASYQTGGSQSIIAYTGSGGGGESQVRQQFSKDIEKLLNEQVNKEMQSSNLYMSMSSWCYTHSLDGAGLFLFDHAAEEYEHAKKLIIFLNENNVPVQLTSISAPEHKFEGLTQIFQKAYEHEQHISESINNIVDHAIKSKDHATFNFLQWYVAEQHEEEVLFKDILDKIELIGNENHGLYLADQYVKGIAKSRKSGS

SEQ ID NO: 412 - protein, 1079 aa, synthetic construct
HHHHHHHHGPLEVLFQGPTTQECDFTPMLTGTPPPIYNFKRLVFTNCNYNLTKLLSLFQVSEFSCHQVSPSSLATGCYSSLTVDYFAYSTDMSSYLQPGSAGAIVQFNYKQDFSNPTCRVLATVPQNLTTITKPSNYAYLTECYKTSAYGKNYLYNAPGAYTPCLSLASRGFSTKYQSHSDGELTTTGYIYPVTGNLQMAFIISVQYGTDTNSVCPMGSGGSGSSQCVNLTTRTQLPPAYTNSFTRGVYYPDKVFRSSVLHSTQDLFLPFFSNVTWFHAIHVSGTNGTKRFDNPVLPFNDGVYFASTEKSNIIRGWIFGTTLDSKTQSLLIVNNATNVVIKVCEFQFCNDPFLGVYYHKNNKSWMESEFRVYSSANNCTFEYVSQPFLMDLEGKQGNFKNLREFVFKNIDGYFKIYSKHTPINLVRDLPQGFSALEPLVDLPIGINITRFQTLLALHRSYLTPGDSSSGWTAGAAAYYVGYLQPRTFLLKYNENGTITDAVDCALDPLSETKCTLKSFTVEKGIYQTSNFRVQPTESIVRFPNITNLCPFGEVFNATRFASVYAWNRKRISNCVADYSVLYNSASFSTFKCYGVSPTKLNDLCFTNVYADSFVIRGDEVRQIAPGQTGKIADYNYKLPDDFTGCVIAWNSNNLDSKVGGNYNYLYRLFRKSNLKPFERDISTEIYQAGSTPCNGVEGFNCYFPLQSYGFQPTNGVGYQPYRVVVLSFELLHAPATVCGPKKSTNLVKNKCVNFNFNGLTGTGVLTESNKKFLPFQQFGRDIADTTDAVRDPQTLEILDITPCSFGGVSVITPGTNTSNQVAVLYQDVNCTEVPVAIHADQLTPTWRVYSTGSNVFQTRAGCLIGAEHVNNSYECDIPIGAGICASYQTGGSQSIIAYTGSGGGGESQVRQQFSKDIEKLLNEQVNKEMQSSNLYMSMSSWCYTHSLDGAGLFLFDHAAEEYEHAKKLIIFLNENNVPVQLTSISAPEHKFEGLTQIFQKAYEHEQHISESINNIVDHAIKSKDHATFNFLQWYVAEQHEEEVLFKDILDKIELIGNENHGLYLADQYVKGIAKSRKSGS

SEQ ID NO: 413 - protein, 694 aa, synthetic construct
HHHHHHHHGPLEVLFQGPNITNLCPFDEVFNATRFASVYAWNRKRISNCVADYSVLYNFAPFFAFKCYGVSPTKLNDLCFTNVYADSFVIRGNEVSQIAPGQTGNIADYNYKLPDDFTGCVIAWNSNKLDSKVGGNYNYRYRLFRKSNLKPFERDISTEIYQAGNKPCNGVAGVNCYFPLQSYGFRPTYGVGHQPYRVVVLSFELLHAPATVCGPGSGGSGSSQCVNLTTRTQLPPAYTNSFTRGVYYPDKVFRSSVLHSTQDLFLPFFSNVTWFHAIHVSGTNGTKRFDNPVLPFNDGVYFASTEKSNIIRGWIFGTTLDSKTQSLLIVNNATNVVIKVCEFQFCNDPFLGVYYHKNNKSWMESEFRVYSSANNCTFEYVSQPFLMDLEGKQGNFKNLREFVFKNIDGYFKIYSKHTPINLVRDLPQGFSALEPLVDLPIGINITRFQTLLALHRSYLTPGDSSSGWTAGAAAYYVGYLQPRTFLLKYNENGTITDAVDCALDPLSETKCTLGSGGGGESQVRQQFSKDIEKLLNEQVNKEMQSSNLYMSMSSWCYTHSLDGAGLFLFDHAAEEYEHAKKLIIFLNENNVPVQLTSISAPEHKFEGLTQIFQKAYEHEQHISESINNIVDHAIKSKDHATFNFLQWYVAEQHEEEVLFKDILDKIELIGNENHGLYLADQYVKGIAKSRKSGS

SEQ ID NO: 414 - protein, 694 aa, synthetic construct
HHHHHHHHGPLEVLFQGPNITNLCPFDEVFNATRFASVYAWNRKRISNCVADYSVLYNFAPFFAFKCYGVSPTKLNDLCFTNVYADSFVIRGNEVSQIAPGQTGNIADYNYKLPDDFTGCVIAWNSNKLDSKVGGNYNYQYRLFRKSNLKPFERDISTEIYQAGNKPCNGVAGFNCYFPLRSYGFRPTYGVGHQPYRVVVLSFELLHAPATVCGPGSGGSGSSQCVNLTTRTQLPPAYTNSFTRGVYYPDKVFRSSVLHSTQDLFLPFFSNVTWFHAIHVSGTNGTKRFDNPVLPFNDGVYFASTEKSNIIRGWIFGTTLDSKTQSLLIVNNATNVVIKVCEFQFCNDPFLGVYYHKNNKSWMESEFRVYSSANNCTFEYVSQPFLMDLEGKQGNFKNLREFVFKNIDGYFKIYSKHTPINLVRDLPQGFSALEPLVDLPIGINITRFQTLLALHRSYLTPGDSSSGWTAGAAAYYVGYLQPRTFLLKYNENGTITDAVDCALDPLSETKCTLGSGGGGESQVRQQFSKDIEKLLNEQVNKEMQSSNLYMSMSSWCYTHSLDGAGLFLFDHAAEEYEHAKKLIIFLNENNVPVQLTSISAPEHKFEGLTQIFQKAYEHEQHISESINNIVDHAIKSKDHATFNFLQWYVAEQHEEEVLFKDILDKIELIGNENHGLYLADQYVKGIAKSRKSGS

SEQ ID NO: 415 - protein, 690 aa, synthetic construct
HHHHHHHHGPLEVLFQGPNITQLCPFNEVFNITSFPSVYAWERMRITNCVADYSVLYNSSASFSTFQCYGVSPTKLNDLCFSSVYADYFVVKGDDVRQIAPAQTGVIADYNYKLPDDFTGCVIAWNTNSLDSSNEFFYRRFRHGKIKPYGRDLSNVLFNPSGGTCSAEGLNCYKPLASYGFTQSSGIGFQPYRVVVLSFELLNAPATVCGPGSGGSGSSQCVNLTTRTQLPPAYTNSFTRGVYYPDKVFRSSVLHSTQDLFLPFFSNVTWFHAIHVSGTNGTKRFDNPVLPFNDGVYFASTEKSNIIRGWIFGTTLDSKTQSLLIVNNATNVVIKVCEFQFCNDPFLGVYYHKNNKSWMESEFRVYSSANNCTFEYVSQPFLMDLEGKQGNFKNLREFVFKNIDGYFKIYSKHTPINLVRDLPQGFSALEPLVDLPIGINITRFQTLLALHRSYLTPGDSSSGWTAGAAAYYVGYLQPRTFLLKYNENGTITDAVDCALDPLSETKCTLGSGGGGESQVRQQFSKDIEKLLNEQVNKEMQSSNLYMSMSSWCYTHSLDGAGLFLFDHAAEEYEHAKKLIIFLNENNVPVQLTSISAPEHKFEGLTQIFQKAYEHEQHISESINNIVDHAIKSKDHATFNFLQWYVAEQHEEEVLFKDILDKIELIGNENHGLYLADQYVKGIAKSRKSGS

SEQ ID NO: 416 - protein, 690 aa, synthetic construct
HHHHHHHHGPLEVLFQGPNITQLCPFNEVFNITSFPSVYAWERMRITNCVADYSVLYNSSASFSTFQCYGVSPTKLNDLCFSSVYADYFVVKGDDVRQIAPAQTGVIADYNYKLPDDFTGCVIAWNTNSLDSSNEFFYRRFRHGKIKPYGRDLSNVLFNPSGGTCSAEGLNCYKPLASYGFWQSSGIGFQPYRVVVLSFELLNAPATVCGPGSGGSGSSQCVNLTTRTQLPPAYTNSFTRGVYYPDKVFRSSVLHSTQDLFLPFFSNVTWFHAIHVSGTNGTKRFDNPVLPFNDGVYFASTEKSNIIRGWIFGTTLDSKTQSLLIVNNATNVVIKVCEFQFCNDPFLGVYYHKNNKSWMESEFRVYSSANNCTFEYVSQPFLMDLEGKQGNFKNLREFVFKNIDGYFKIYSKHTPINLVRDLPQGFSALEPLVDLPIGINITRFQTLLALHRSYLTPGDSSSGWTAGAAAYYVGYLQPRTFLLKYNENGTITDAVDCALDPLSETKCTLGSGGGGESQVRQQFSKDIEKLLNEQVNKEMQSSNLYMSMSSWCYTHSLDGAGLFLFDHAAEEYEHAKKLIIFLNENNVPVQLTSISAPEHKFEGLTQIFQKAYEHEQHISESINNIVDHAIKSKDHATFNFLQWYVAEQHEEEVLFKDILDKIELIGNENHGLYLADQYVKGIAKSRKSGS

SEQ ID NO: 417 - protein, 690 aa, synthetic construct
HHHHHHHHGPLEVLFQGPNITQLCPFNEVFNITSFPSVYAWERMRITNCVADYSVLYNSSASFSTFQCYGVSPTKLNDLCFSSVYADYFVVKGDDVRQIAPAQTGVIADYNYKLPDDFTGCVIAWNTNSLDSSNEFFYRRFRHGKIKPYGRDLSNVLFNPSGGTCSAEGLNCYKPLYSYGFWQSSGIGFQPYRVVVLSFELLNAPATVCGPGSGGSGSSQCVNLTTRTQLPPAYTNSFTRGVYYPDKVFRSSVLHSTQDLFLPFFSNVTWFHAIHVSGTNGTKRFDNPVLPFNDGVYFASTEKSNIIRGWIFGTTLDSKTQSLLIVNNATNVVIKVCEFQFCNDPFLGVYYHKNNKSWMESEFRVYSSANNCTFEYVSQPFLMDLEGKQGNFKNLREFVFKNIDGYFKIYSKHTPINLVRDLPQGFSALEPLVDLPIGINITRFQTLLALHRSYLTPGDSSSGWTAGAAAYYVGYLQPRTFLLKYNENGTITDAVDCALDPLSETKCTLGSGGGGESQVRQQFSKDIEKLLNEQVNKEMQSSNLYMSMSSWCYTHSLDGAGLFLFDHAAEEYEHAKKLIIFLNENNVPVQLTSISAPEHKFEGLTQIFQKAYEHEQHISESINNIVDHAIKSKDHATFNFLQWYVAEQHEEEVLFKDILDKIELIGNENHGLYLADQYVKGIAKSRKSGS

SEQ ID NO: 418 - protein, 693 aa, synthetic construct
HHHHHHHHGPLEVLFQGPNITNLCPFGEVFNATTFPSVYAWERKRISNCVADYSVLYNSTSFSTFKCYGVSATKLNDLCFSNVYADSFVVKGDDVRQIAPGQTGVIADYNYKLPDDFLGCVLAWNTNSKDSSTSGNYNYLYRWVRRSKLNPYERDLSNDIYSPGGQSCSAVGPNCYNPLRPYGFFTTAGVGHQPYRVVVLSFELLNAPATVCGPGSGGSGSSQCVNLTTRTQLPPAYTNSFTRGVYYPDKVFRSSVLHSTQDLFLPFFSNVTWFHAIHVSGTNGTKRFDNPVLPFNDGVYFASTEKSNIIRGWIFGTTLDSKTQSLLIVNNATNVVIKVCEFQFCNDPFLGVYYHKNNKSWMESEFRVYSSANNCTFEYVSQPFLMDLEGKQGNFKNLREFVFKNIDGYFKIYSKHTPINLVRDLPQGFSALEPLVDLPIGINITRFQTLLALHRSYLTPGDSSSGWTAGAAAYYVGYLQPRTFLLKYNENGTITDAVDCALDPLSETKCTLGSGGGGESQVRQQFSKDIEKLLNEQVNKEMQSSNLYMSMSSWCYTHSLDGAGLFLFDHAAEEYEHAKKLIIFLNENNVPVQLTSISAPEHKFEGLTQIFQKAYEHEQHISESINNIVDHAIKSKDHATFNFLQWYVAEQHEEEVLFKDILDKIELIGNENHGLYLADQYVKGIAKSRKSGS

SEQ ID NO: 419 - protein, 693 aa, synthetic construct
HHHHHHHHGPLEVLFQGPNITNLCPFGEVFNATTFPSVYAWERKRISNCVADYSVLYNSTSFSTFKCYGVSATKLNDLCFSNVYADSFVVKGDDVRQIAPGQTGVIADYNYKLPDDFTGCVLAWNTRNIDATQTGNYNYKYRSLRHGKLRPFERDISNVPFSPDGKPCTPPAFNCYWPLNDYGFYITNGIGYQPYRVVVLSFELLNAPATVCGPGSGGSGSSQCVNLTTRTQLPPAYTNSFTRGVYYPDKVFRSSVLHSTQDLFLPFFSNVTWFHAIHVSGTNGTKRFDNPVLPFNDGVYFASTEKSNIIRGWIFGTTLDSKTQSLLIVNNATNVVIKVCEFQFCNDPFLGVYYHKNNKSWMESEFRVYSSANNCTFEYVSQPFLMDLEGKQGNFKNLREFVFKNIDGYFKIYSKHTPINLVRDLPQGFSALEPLVDLPIGINITRFQTLLALHRSYLTPGDSSSGWTAGAAAYYVGYLQPRTFLLKYNENGTITDAVDCALDPLSETKCTLGSGGGGESQVRQQFSKDIEKLLNEQVNKEMQSSNLYMSMSSWCYTHSLDGAGLFLFDHAAEEYEHAKKLIIFLNENNVPVQLTSISAPEHKFEGLTQIFQKAYEHEQHISESINNIVDHAIKSKDHATFNFLQWYVAEQHEEEVLFKDILDKIELIGNENHGLYLADQYVKGIAKSRKSGS

SEQ ID NO: 420 - protein, 675 aa, synthetic construct
HHHHHHHHGPLEVLFQGPNITNVCPFHKVFNATRFPSVYAWERTKISDCIADYTVFYNSTSFSTFKCYGVSPSKLIDLCFTSVYADTFLIRFSEVRQVAPGQTGVIADYNYKLPDDFTGCVIAWNTAKQDTGHYFYRSHRSTKLKPFERDLSSDENGVRTLSTYDFNPNVPLEYQATRVVVLSFELLNAPATVCGPGSGGSGSSQCVNLTTRTQLPPAYTNSFTRGVYYPDKVFRSSVLHSTQDLFLPFFSNVTWFHAIHVSGTNGTKRFDNPVLPFNDGVYFASTEKSNIIRGWIFGTTLDSKTQSLLIVNNATNVVIKVCEFQFCNDPFLGVYYHKNNKSWMESEFRVYSSANNCTFEYVSQPFLMDLEGKQGNFKNLREFVFKNIDGYFKIYSKHTPINLVRDLPQGFSALEPLVDLPIGINITRFQTLLALHRSYLTPGDSSSGWTAGAAAYYVGYLQPRTFLLKYNENGTITDAVDCALDPLSETKCTLGSGGGGESQVRQQFSKDIEKLLNEQVNKEMQSSNLYMSMSSWCYTHSLDGAGLFLFDHAAEEYEHAKKLIIFLNENNVPVQLTSISAPEHKFEGLTQIFQKAYEHEQHISESINNIVDHAIKSKDHATFNFLQWYVAEQHEEEVLFKDILDKIELIGNENHGLYLADQYVKGIAKSRKSGS

SEQ ID NO: 421 - protein, 694 aa, synthetic construct
HHHHHHHHGPLEVLFQGPNITNLCPFGEVFNATTFASVYAWNRKRISNCVADYSVLYNSTSFSTFKCYGVSPTKLNDLCFTNVYADSFVVRGDEVRQIAPGQTGKIADYNYKLPDDFTGCVIAWNSNNLDSKVGGNYNYLYRLFRKSNLKPFERDISTEIYQAGSTPCNGVEGFNCYFPLQSYGFHPTNGVGYQPYRVVVLSFELLNAPATVCGPGSGGSGSSQCVNLTTRTQLPPAYTNSFTRGVYYPDKVFRSSVLHSTQDLFLPFFSNVTWFHAIHVSGTNGTKRFDNPVLPFNDGVYFASTEKSNIIRGWIFGTTLDSKTQSLLIVNNATNVVIKVCEFQFCNDPFLGVYYHKNNKSWMESEFRVYSSANNCTFEYVSQPFLMDLEGKQGNFKNLREFVFKNIDGYFKIYSKHTPINLVRDLPQGFSALEPLVDLPIGINITRFQTLLALHRSYLTPGDSSSGWTAGAAAYYVGYLQPRTFLLKYNENGTITDAVDCALDPLSETKCTLGSGGGGESQVRQQFSKDIEKLLNEQVNKEMQSSNLYMSMSSWCYTHSLDGAGLFLFDHAAEEYEHAKKLIIFLNENNVPVQLTSISAPEHKFEGLTQIFQKAYEHEQHISESINNIVDHAIKSKDHATFNFLQWYVAEQHEEEVLFKDILDKIELIGNENHGLYLADQYVKGIAKSRKSGS

SEQ ID NO: 422 - protein, 694 aa, synthetic construct
HHHHHHHHGPLEVLFQGPNITNLCPFGEVFNATTFASVYAWNRKRISNCVADYSVLYNSTSFSTFKCYGVSPTKLNDLCFTNVYADSFVITGDEVRQIAPGQTGKIADYNYKLPDDFTGCVIAWNSKHIDAKEGGNFNYLYRLFRKANLKPFERDISTEIYQAGSKPCNGQTGLNCYYPLYRYGFYPTDGVGHQPYRVVVLSFELLNAPATVCGPGSGGSGSSQCVNLTTRTQLPPAYTNSFTRGVYYPDKVFRSSVLHSTQDLFLPFFSNVTWFHAIHVSGTNGTKRFDNPVLPFNDGVYFASTEKSNIIRGWIFGTTLDSKTQSLLIVNNATNVVIKVCEFQFCNDPFLGVYYHKNNKSWMESEFRVYSSANNCTFEYVSQPFLMDLEGKQGNFKNLREFVFKNIDGYFKIYSKHTPINLVRDLPQGFSALEPLVDLPIGINITRFQTLLALHRSYLTPGDSSSGWTAGAAAYYVGYLQPRTFLLKYNENGTITDAVDCALDPLSETKCTLGSGGGGESQVRQQFSKDIEKLLNEQVNKEMQSSNLYMSMSSWCYTHSLDGAGLFLFDHAAEEYEHAKKLIIFLNENNVPVQLTSISAPEHKFEGLTQIFQKAYEHEQHISESINNIVDHAIKSKDHATFNFLQWYVAEQHEEEVLFKDILDKIELIGNENHGLYLADQYVKGIAKSRKSGS

SEQ ID NO: 423 - protein, 675 aa, synthetic construct
HHHHHHHHGPLEVLFQGPNITNFCPFDKVFNATRFPNVYAWQRTKISDCIADYTVLYNSTSFSTFKCYGVSPSKLIDLCFTSVYADTFLIRFSEVRQIAPGETGVIADYNYKLPDDFTGCVLAWNTAQQDIGSYFYRSHRAVKLKPFERDLSSDENGVRTLSTYDFNPNVPLDYQATRVVVLSFELLNAPATVCGPGSGGSGSSQCVNLTTRTQLPPAYTNSFTRGVYYPDKVFRSSVLHSTQDLFLPFFSNVTWFHAIHVSGTNGTKRFDNPVLPFNDGVYFASTEKSNIIRGWIFGTTLDSKTQSLLIVNNATNVVIKVCEFQFCNDPFLGVYYHKNNKSWMESEFRVYSSANNCTFEYVSQPFLMDLEGKQGNFKNLREFVFKNIDGYFKIYSKHTPINLVRDLPQGFSALEPLVDLPIGINITRFQTLLALHRSYLTPGDSSSGWTAGAAAYYVGYLQPRTFLLKYNENGTITDAVDCALDPLSETKCTLGSGGGGESQVRQQFSKDIEKLLNEQVNKEMQSSNLYMSMSSWCYTHSLDGAGLFLFDHAAEEYEHAKKLIIFLNENNVPVQLTSISAPEHKFEGLTQIFQKAYEHEQHISESINNIVDHAIKSKDHATFNFLQWYVAEQHEEEVLFKDILDKIELIGNENHGLYLADQYVKGIAKSRKSGS

SEQ ID NO: 424 - protein, 675 aa, synthetic construct
HHHHHHHHGPLEVLFQGPNITNFCPFDKVFNATRFPNVYAWQRTKISDCIADYTVLYNSTSFSTFKCYGVSPSKLIDLCFTSVYADTFLIRFSEVRQIAPGETGVIADYNYKLPDDFTGCVLAWNTAQQDIGSYFYRSHRAVKLKPFERDLSSDENGVRTLSTYDFWPNVPLDYQATRVVVLSFELLNAPATVCGPGSGGSGSSQCVNLTTRTQLPPAYTNSFTRGVYYPDKVFRSSVLHSTQDLFLPFFSNVTWFHAIHVSGTNGTKRFDNPVLPFNDGVYFASTEKSNIIRGWIFGTTLDSKTQSLLIVNNATNVVIKVCEFQFCNDPFLGVYYHKNNKSWMESEFRVYSSANNCTFEYVSQPFLMDLEGKQGNFKNLREFVFKNIDGYFKIYSKHTPINLVRDLPQGFSALEPLVDLPIGINITRFQTLLALHRSYLTPGDSSSGWTAGAAAYYVGYLQPRTFLLKYNENGTITDAVDCALDPLSETKCTLGSGGGGESQVRQQFSKDIEKLLNEQVNKEMQSSNLYMSMSSWCYTHSLDGAGLFLFDHAAEEYEHAKKLIIFLNENNVPVQLTSISAPEHKFEGLTQIFQKAYEHEQHISESINNIVDHAIKSKDHATFNFLQWYVAEQHEEEVLFKDILDKIELIGNENHGLYLADQYVKGIAKSRKSGS

SEQ ID NO: 425 - protein, 675 aa, synthetic construct
HHHHHHHHGPLEVLFQGPNITNFCPFDKVFNATRFPNVYAWQRTKISDCIADYTVLYNSTSFSTFKCYGVSPSKLIDLCFTSVYADTFLIRFSEVRQIAPGETGVIADYNYKLPDDFTGCVLAWNTAQQDIGSYFYRSHRAVKLKPFERDLSSDENGVRTLYTYDFWPNVPLDYQATRVVVLSFELLNAPATVCGPGSGGSGSSQCVNLTTRTQLPPAYTNSFTRGVYYPDKVFRSSVLHSTQDLFLPFFSNVTWFHAIHVSGTNGTKRFDNPVLPFNDGVYFASTEKSNIIRGWIFGTTLDSKTQSLLIVNNATNVVIKVCEFQFCNDPFLGVYYHKNNKSWMESEFRVYSSANNCTFEYVSQPFLMDLEGKQGNFKNLREFVFKNIDGYFKIYSKHTPINLVRDLPQGFSALEPLVDLPIGINITRFQTLLALHRSYLTPGDSSSGWTAGAAAYYVGYLQPRTFLLKYNENGTITDAVDCALDPLSETKCTLGSGGGGESQVRQQFSKDIEKLLNEQVNKEMQSSNLYMSMSSWCYTHSLDGAGLFLFDHAAEEYEHAKKLIIFLNENNVPVQLTSISAPEHKFEGLTQIFQKAYEHEQHISESINNIVDHAIKSKDHATFNFLQWYVAEQHEEEVLFKDILDKIELIGNENHGLYLADQYVKGIAKSRKSGS

SEQ ID NO: 426 - protein, 675 aa, synthetic construct
HHHHHHHHGPLEVLFQGPNITNLCPFDAVFNATRFPSVYAWERVKISNCVADYTAFYNSTSFSTFKCYGVSPSKLIDLCFTSVYADTFLIRFSEVRQVAPGETGVIADYNYKLPDDFTGCVIAWNTAKQDVGSYFYRSHRSSKLKPFERDLSSDENGVRTLSTYDFNPNVPLDYQATRVVVLSFELLNAPATVCGPGSGGSGSSQCVNLTTRTQLPPAYTNSFTRGVYYPDKVFRSSVLHSTQDLFLPFFSNVTWFHAIHVSGTNGTKRFDNPVLPFNDGVYFASTEKSNIIRGWIFGTTLDSKTQSLLIVNNATNVVIKVCEFQFCNDPFLGVYYHKNNKSWMESEFRVYSSANNCTFEYVSQPFLMDLEGKQGNFKNLREFVFKNIDGYFKIYSKHTPINLVRDLPQGFSALEPLVDLPIGINITRFQTLLALHRSYLTPGDSSSGWTAGAAAYYVGYLQPRTFLLKYNENGTITDAVDCALDPLSETKCTLGSGGGGESQVRQQFSKDIEKLLNEQVNKEMQSSNLYMSMSSWCYTHSLDGAGLFLFDHAAEEYEHAKKLIIFLNENNVPVQLTSISAPEHKFEGLTQIFQKAYEHEQHISESINNIVDHAIKSKDHATFNFLQWYVAEQHEEEVLFKDILDKIELIGNENHGLYLADQYVKGIAKSRKSGS

SEQ ID NO: 427 - protein, 675 aa, synthetic construct
HHHHHHHHGPLEVLFQGPNITNRCPFDKVFNATRFPSVYAWERTKISDCVADYTVLYNSTSFSTFKCYGVSPSKLIDLCFTSVYADTFLIRSSEVRQVAPGETGVIADYNYKLPDDFTGCVIAWNTANQDQGQYYYRSSRKEKLKPFERDLSSDENGVYTLSTYDFYPSVPLDYQATRVVVLSFELLNAPATVCGPGSGGSGSSQCVNLTTRTQLPPAYTNSFTRGVYYPDKVFRSSVLHSTQDLFLPFFSNVTWFHAIHVSGTNGTKRFDNPVLPFNDGVYFASTEKSNIIRGWIFGTTLDSKTQSLLIVNNATNVVIKVCEFQFCNDPFLGVYYHKNNKSWMESEFRVYSSANNCTFEYVSQPFLMDLEGKQGNFKNLREFVFKNIDGYFKIYSKHTPINLVRDLPQGFSALEPLVDLPIGINITRFQTLLALHRSYLTPGDSSSGWTAGAAAYYVGYLQPRTFLLKYNENGTITDAVDCALDPLSETKCTLGSGGGGESQVRQQFSKDIEKLLNEQVNKEMQSSNLYMSMSSWCYTHSLDGAGLFLFDHAAEEYEHAKKLIIFLNENNVPVQLTSISAPEHKFEGLTQIFQKAYEHEQHISESINNIVDHAIKSKDHATFNFLQWYVAEQHEEEVLFKDILDKIELIGNENHGLYLADQYVKGIAKSRKSGS

SEQ ID NO: 428 - protein, 675 aa, synthetic construct
HHHHHHHHGPLEVLFQGPNITNLCPFDKVFNATRFPSVYAWERTKISDCVADYTVFYNSTSFSTFNCYGVSPSKLIDLCFTSVYADTFLIRFSEVRQVAPGQTGVIADYNYKLPDDFTGCVIAWNTAKQDVGSYFYRSHRSSKLKPFERDLSSEENGVRTLSTYDFNQYVPLEYQATRVVVLSFELLNAPATVCGPGSGGSGSSQCVNLTTRTQLPPAYTNSFTRGVYYPDKVFRSSVLHSTQDLFLPFFSNVTWFHAIHVSGTNGTKRFDNPVLPFNDGVYFASTEKSNIIRGWIFGTTLDSKTQSLLIVNNATNVVIKVCEFQFCNDPFLGVYYHKNNKSWMESEFRVYSSANNCTFEYVSQPFLMDLEGKQGNFKNLREFVFKNIDGYFKIYSKHTPINLVRDLPQGFSALEPLVDLPIGINITRFQTLLALHRSYLTPGDSSSGWTAGAAAYYVGYLQPRTFLLKYNENGTITDAVDCALDPLSETKCTLGSGGGGESQVRQQFSKDIEKLLNEQVNKEMQSSNLYMSMSSWCYTHSLDGAGLFLFDHAAEEYEHAKKLIIFLNENNVPVQLTSISAPEHKFEGLTQIFQKAYEHEQHISESINNIVDHAIKSKDHATFNFLQWYVAEQHEEEVLFKDILDKIELIGNENHGLYLADQYVKGIAKSRKSGS

SEQ ID NO: 429 - protein, 675 aa, synthetic construct
HHHHHHHHGPLEVLFQGPNITNRCPFDKVFNATRFPNVYAWERTKISDCVADYTVLYNSTSFSTFKCYGVSPSKLIDLCFTSVYADTFLIRSSEVRQVAPGETGVIADYNYKLPDDFTGCVIAWNTAKQDQGQYYYRSHRKTKLKPFERDLSSDENGVRTLSTYDFYPSVPVAYQATRVVVLSFELLNAPATVCGPGSGGSGSSQCVNLTTRTQLPPAYTNSFTRGVYYPDKVFRSSVLHSTQDLFLPFFSNVTWFHAIHVSGTNGTKRFDNPVLPFNDGVYFASTEKSNIIRGWIFGTTLDSKTQSLLIVNNATNVVIKVCEFQFCNDPFLGVYYHKNNKSWMESEFRVYSSANNCTFEYVSQPFLMDLEGKQGNFKNLREFVFKNIDGYFKIYSKHTPINLVRDLPQGFSALEPLVDLPIGINITRFQTLLALHRSYLTPGDSSSGWTAGAAAYYVGYLQPRTFLLKYNENGTITDAVDCALDPLSETKCTLGSGGGGESQVRQQFSKDIEKLLNEQVNKEMQSSNLYMSMSSWCYTHSLDGAGLFLFDHAAEEYEHAKKLIIFLNENNVPVQLTSISAPEHKFEGLTQIFQKAYEHEQHISESINNIVDHAIKSKDHATFNFLQWYVAEQHEEEVLFKDILDKIELIGNENHGLYLADQYVKGIAKSRKSGS

SEQ ID NO: 430 - protein, 675 aa, synthetic construct
HHHHHHHHGPLEVLFQGPNITNRCPFDKVFNASRFPNVYAWERTKISDCVADYTVLYNSTSFSTFKCYGVSPSKLIDLCFTSVYADTFLIRSSEVRQVAPGETGVIADYNYKLPDDFTGCVIAWNTAKQDQGQYYYRSSRKTKLKPFERDLTSDENGVRTLSTYDFYPNVPIEYQATRVVVLSFELLNAPATVCGPGSGGSGSSQCVNLTTRTQLPPAYTNSFTRGVYYPDKVFRSSVLHSTQDLFLPFFSNVTWFHAIHVSGTNGTKRFDNPVLPFNDGVYFASTEKSNIIRGWIFGTTLDSKTQSLLIVNNATNVVIKVCEFQFCNDPFLGVYYHKNNKSWMESEFRVYSSANNCTFEYVSQPFLMDLEGKQGNFKNLREFVFKNIDGYFKIYSKHTPINLVRDLPQGFSALEPLVDLPIGINITRFQTLLALHRSYLTPGDSSSGWTAGAAAYYVGYLQPRTFLLKYNENGTITDAVDCALDPLSETKCTLGSGGGGESQVRQQFSKDIEKLLNEQVNKEMQSSNLYMSMSSWCYTHSLDGAGLFLFDHAAEEYEHAKKLIIFLNENNVPVQLTSISAPEHKFEGLTQIFQKAYEHEQHISESINNIVDHAIKSKDHATFNFLQWYVAEQHEEEVLFKDILDKIELIGNENHGLYLADQYVKGIAKSRKSGS

SEQ ID NO: 431 - protein, 690 aa, synthetic construct
HHHHHHHHGPLEVLFQGPNITNLCPFSQVFNATRFPSVYAWTRERISNCIADYSVLYNSTSFSTFRCYGVSPTKLNDLCFSNVYADSMVVRGDEVRQIAPSQTGVIADYNYKLPDDFTGCVIAWNSKAKDENGQYFYRLFRKSKLLPFQRDVSNVTYGSGKNDGCNPSEADCYWPLLKYGFTSSVSQDYQPYRVVVLSFELLNAPATVCGPGSGGSGSSQCVNLTTRTQLPPAYTNSFTRGVYYPDKVFRSSVLHSTQDLFLPFFSNVTWFHAIHVSGTNGTKRFDNPVLPFNDGVYFASTEKSNIIRGWIFGTTLDSKTQSLLIVNNATNVVIKVCEFQFCNDPFLGVYYHKNNKSWMESEFRVYSSANNCTFEYVSQPFLMDLEGKQGNFKNLREFVFKNIDGYFKIYSKHTPINLVRDLPQGFSALEPLVDLPIGINITRFQTLLALHRSYLTPGDSSSGWTAGAAAYYVGYLQPRTFLLKYNENGTITDAVDCALDPLSETKCTLGSGGGGESQVRQQFSKDIEKLLNEQVNKEMQSSNLYMSMSSWCYTHSLDGAGLFLFDHAAEEYEHAKKLIIFLNENNVPVQLTSISAPEHKFEGLTQIFQKAYEHEQHISESINNIVDHAIKSKDHATFNFLQWYVAEQHEEEVLFKDILDKIELIGNENHGLYLADQYVKGIAKSRKSGS

SEQ ID NO: 432 - protein, 690 aa, synthetic construct
HHHHHHHHGPLEVLFQGPNITNLCPFSQVFNATRFPSVYAWTRERISNCIADYSVLYNSTSFSTFRCYGVSPTKLNDLCFSNVYADSMVVRGDEVRQIAPSQTGVIADYNYKLPDDFTGCVIAWNSKAKDENGQYFYRLFRKSKLLPFQRDVSNVTYGSGKNDGCNPSEADCYWPLLKYGFWSSVSQDYQPYRVVVLSFELLNAPATVCGPGSGGSGSSQCVNLTTRTQLPPAYTNSFTRGVYYPDKVFRSSVLHSTQDLFLPFFSNVTWFHAIHVSGTNGTKRFDNPVLPFNDGVYFASTEKSNIIRGWIFGTTLDSKTQSLLIVNNATNVVIKVCEFQFCNDPFLGVYYHKNNKSWMESEFRVYSSANNCTFEYVSQPFLMDLEGKQGNFKNLREFVFKNIDGYFKIYSKHTPINLVRDLPQGFSALEPLVDLPIGINITRFQTLLALHRSYLTPGDSSSGWTAGAAAYYVGYLQPRTFLLKYNENGTITDAVDCALDPLSETKCTLGSGGGGESQVRQQFSKDIEKLLNEQVNKEMQSSNLYMSMSSWCYTHSLDGAGLFLFDHAAEEYEHAKKLIIFLNENNVPVQLTSISAPEHKFEGLTQIFQKAYEHEQHISESINNIVDHAIKSKDHATFNFLQWYVAEQHEEEVLFKDILDKIELIGNENHGLYLADQYVKGIAKSRKSGS

SEQ ID NO: 433 - protein, 690 aa, synthetic construct
HHHHHHHHGPLEVLFQGPNITNLCPFSQVFNATRFPSVYAWTRERISNCIADYSVLYNSTSFSTFRCYGVSPTKLNDLCFSNVYADSMVVRGDEVRQIAPSQTGVIADYNYKLPDDFTGCVIAWNSKAKDENGQYFYRLFRKSKLLPFQRDVSNVTYGSGKNDGCNPSEADCYWPLYKYGFWSSVSQDYQPYRVVVLSFELLNAPATVCGPGSGGSGSSQCVNLTTRTQLPPAYTNSFTRGVYYPDKVFRSSVLHSTQDLFLPFFSNVTWFHAIHVSGTNGTKRFDNPVLPFNDGVYFASTEKSNIIRGWIFGTTLDSKTQSLLIVNNATNVVIKVCEFQFCNDPFLGVYYHKNNKSWMESEFRVYSSANNCTFEYVSQPFLMDLEGKQGNFKNLREFVFKNIDGYFKIYSKHTPINLVRDLPQGFSALEPLVDLPIGINITRFQTLLALHRSYLTPGDSSSGWTAGAAAYYVGYLQPRTFLLKYNENGTITDAVDCALDPLSETKCTLGSGGGGESQVRQQFSKDIEKLLNEQVNKEMQSSNLYMSMSSWCYTHSLDGAGLFLFDHAAEEYEHAKKLIIFLNENNVPVQLTSISAPEHKFEGLTQIFQKAYEHEQHISESINNIVDHAIKSKDHATFNFLQWYVAEQHEEEVLFKDILDKIELIGNENHGLYLADQYVKGIAKSRKSGS

SEQ ID NO: 434 - protein, 691 aa, synthetic construct
HHHHHHHHGPLEVLFQGPNMTNICPFDQVFNKTQFPSVYAWERVRISDCVSDYTVLYNSSASFSTFKCYGVSPTKLNDLCFSGVYADYFVVKGDHVHQIAPGQTGVIADYNYKLPSEFVGCILAWNTRTIDSKRGFYYRLFRHGNIRPYERDTSNVPYNAAGGTCNQPGTHNCYEPLQDYGFTSTSGVGYQPFRVVVLSFELLNAPATVCGPGSGGSGSSQCVNLTTRTQLPPAYTNSFTRGVYYPDKVFRSSVLHSTQDLFLPFFSNVTWFHAIHVSGTNGTKRFDNPVLPFNDGVYFASTEKSNIIRGWIFGTTLDSKTQSLLIVNNATNVVIKVCEFQFCNDPFLGVYYHKNNKSWMESEFRVYSSANNCTFEYVSQPFLMDLEGKQGNFKNLREFVFKNIDGYFKIYSKHTPINLVRDLPQGFSALEPLVDLPIGINITRFQTLLALHRSYLTPGDSSSGWTAGAAAYYVGYLQPRTFLLKYNENGTITDAVDCALDPLSETKCTLGSGGGGESQVRQQFSKDIEKLLNEQVNKEMQSSNLYMSMSSWCYTHSLDGAGLFLFDHAAEEYEHAKKLIIFLNENNVPVQLTSISAPEHKFEGLTQIFQKAYEHEQHISESINNIVDHAIKSKDHATFNFLQWYVAEQHEEEVLFKDILDKIELIGNENHGLYLADQYVKGIAKSRKSGS

SEQ ID NO: 435 - protein, 691 aa, synthetic construct
HHHHHHHHGPLEVLFQGPNMTNICPFDQVFNKTQFPSVYAWERVRISDCVSDYTVLYNSSASFSTFKCYGVSPTKLNDLCFSGVYADYFVVKGDHVHQIAPGQTGVIADYNYKLPSEFVGCILAWNTRTIDSKRGFYYRLFRHGNIRPYERDTSNVPYNAAGGTCNQPGTHNCYEPLQDYGFWSTSGVGYQPFRVVVLSFELLNAPATVCGPGSGGSGSSQCVNLTTRTQLPPAYTNSFTRGVYYPDKVFRSSVLHSTQDLFLPFFSNVTWFHAIHVSGTNGTKRFDNPVLPFNDGVYFASTEKSNIIRGWIFGTTLDSKTQSLLIVNNATNVVIKVCEFQFCNDPFLGVYYHKNNKSWMESEFRVYSSANNCTFEYVSQPFLMDLEGKQGNFKNLREFVFKNIDGYFKIYSKHTPINLVRDLPQGFSALEPLVDLPIGINITRFQTLLALHRSYLTPGDSSSGWTAGAAAYYVGYLQPRTFLLKYNENGTITDAVDCALDPLSETKCTLGSGGGGESQVRQQFSKDIEKLLNEQVNKEMQSSNLYMSMSSWCYTHSLDGAGLFLFDHAAEEYEHAKKLIIFLNENNVPVQLTSISAPEHKFEGLTQIFQKAYEHEQHISESINNIVDHAIKSKDHATFNFLQWYVAEQHEEEVLFKDILDKIELIGNENHGLYLADQYVKGIAKSRKSGS

SEQ ID NO: 436 - protein, 691 aa, synthetic construct
HHHHHHHHGPLEVLFQGPNMTNICPFDQVFNKTQFPSVYAWERVRISDCVSDYTVLYNSSASFSTFKCYGVSPTKLNDLCFSGVYADYFVVKGDHVHQIAPGQTGVIADYNYKLPSEFVGCILAWNTRTIDSKRGFYYRLFRHGNIRPYERDTSNVPYNAAGGTCNQPGTHNCYEPLYDYGFWSTSGVGYQPFRVVVLSFELLNAPATVCGPGSGGSGSSQCVNLTTRTQLPPAYTNSFTRGVYYPDKVFRSSVLHSTQDLFLPFFSNVTWFHAIHVSGTNGTKRFDNPVLPFNDGVYFASTEKSNIIRGWIFGTTLDSKTQSLLIVNNATNVVIKVCEFQFCNDPFLGVYYHKNNKSWMESEFRVYSSANNCTFEYVSQPFLMDLEGKQGNFKNLREFVFKNIDGYFKIYSKHTPINLVRDLPQGFSALEPLVDLPIGINITRFQTLLALHRSYLTPGDSSSGWTAGAAAYYVGYLQPRTFLLKYNENGTITDAVDCALDPLSETKCTLGSGGGGESQVRQQFSKDIEKLLNEQVNKEMQSSNLYMSMSSWCYTHSLDGAGLFLFDHAAEEYEHAKKLIIFLNENNVPVQLTSISAPEHKFEGLTQIFQKAYEHEQHISESINNIVDHAIKSKDHATFNFLQWYVAEQHEEEVLFKDILDKIELIGNENHGLYLADQYVKGIAKSRKSGS

SEQ ID NO: 437 - protein, 693 aa, synthetic construct
HHHHHHHHGPLEVLFQGPNITNLCPFGQVFNASNFPSVYAWERLRISDCVADYAVLYNSSSSFSTFKCYGVSPTKLNDLCFSSVYADYFVVKGDDVRQIAPAQTGVIADYNYKLPDDFTGCVLAWNTNSVDSKSGNNFYYRLFRHGKIKPYERDISNVLYNSAGGTCSSISQLGCYEPLKSYGFTPTVGVGYQPYRVVVLSFELLNAPATVCGPGSGGSGSSQCVNLTTRTQLPPAYTNSFTRGVYYPDKVFRSSVLHSTQDLFLPFFSNVTWFHAIHVSGTNGTKRFDNPVLPFNDGVYFASTEKSNIIRGWIFGTTLDSKTQSLLIVNNATNVVIKVCEFQFCNDPFLGVYYHKNNKSWMESEFRVYSSANNCTFEYVSQPFLMDLEGKQGNFKNLREFVFKNIDGYFKIYSKHTPINLVRDLPQGFSALEPLVDLPIGINITRFQTLLALHRSYLTPGDSSSGWTAGAAAYYVGYLQPRTFLLKYNENGTITDAVDCALDPLSETKCTLGSGGGGESQVRQQFSKDIEKLLNEQVNKEMQSSNLYMSMSSWCYTHSLDGAGLFLFDHAAEEYEHAKKLIIFLNENNVPVQLTSISAPEHKFEGLTQIFQKAYEHEQHISESINNIVDHAIKSKDHATFNFLQWYVAEQHEEEVLFKDILDKIELIGNENHGLYLADQYVKGIAKSRKSGS

SEQ ID NO: 438 - protein, 693 aa, synthetic construct
HHHHHHHHGPLEVLFQGPNITNLCPFGQVFNASNFPSVYAWERLRISDCVADYAVLYNSSSSFSTFKCYGVSPTKLNDLCFSSVYADYFVVKGDDVRQIAPAQTGVIADYNYKLPDDFTGCVLAWNTNSVDSKSGNNFYYRLFRHGKIKPYERDISNVLYNSAGGTCSSISQLGCYEPLKSYGFWPTVGVGYQPYRVVVLSFELLNAPATVCGPGSGGSGSSQCVNLTTRTQLPPAYTNSFTRGVYYPDKVFRSSVLHSTQDLFLPFFSNVTWFHAIHVSGTNGTKRFDNPVLPFNDGVYFASTEKSNIIRGWIFGTTLDSKTQSLLIVNNATNVVIKVCEFQFCNDPFLGVYYHKNNKSWMESEFRVYSSANNCTFEYVSQPFLMDLEGKQGNFKNLREFVFKNIDGYFKIYSKHTPINLVRDLPQGFSALEPLVDLPIGINITRFQTLLALHRSYLTPGDSSSGWTAGAAAYYVGYLQPRTFLLKYNENGTITDAVDCALDPLSETKCTLGSGGGGESQVRQQFSKDIEKLLNEQVNKEMQSSNLYMSMSSWCYTHSLDGAGLFLFDHAAEEYEHAKKLIIFLNENNVPVQLTSISAPEHKFEGLTQIFQKAYEHEQHISESINNIVDHAIKSKDHATFNFLQWYVAEQHEEEVLFKDILDKIELIGNENHGLYLADQYVKGIAKSRKSGS

SEQ ID NO: 439 - protein, 693 aa, synthetic construct
HHHHHHHHGPLEVLFQGPNITNLCPFGQVFNASNFPSVYAWERLRISDCVADYAVLYNSSSSFSTFKCYGVSPTKLNDLCFSSVYADYFVVKGDDVRQIAPAQTGVIADYNYKLPDDFTGCVLAWNTNSVDSKSGNNFYYRLFRHGKIKPYERDISNVLYNSAGGTCSSISQLGCYEPLYSYGFWPTVGVGYQPYRVVVLSFELLNAPATVCGPGSGGSGSSQCVNLTTRTQLPPAYTNSFTRGVYYPDKVFRSSVLHSTQDLFLPFFSNVTWFHAIHVSGTNGTKRFDNPVLPFNDGVYFASTEKSNIIRGWIFGTTLDSKTQSLLIVNNATNVVIKVCEFQFCNDPFLGVYYHKNNKSWMESEFRVYSSANNCTFEYVSQPFLMDLEGKQGNFKNLREFVFKNIDGYFKIYSKHTPINLVRDLPQGFSALEPLVDLPIGINITRFQTLLALHRSYLTPGDSSSGWTAGAAAYYVGYLQPRTFLLKYNENGTITDAVDCALDPLSETKCTLGSGGGGESQVRQQFSKDIEKLLNEQVNKEMQSSNLYMSMSSWCYTHSLDGAGLFLFDHAAEEYEHAKKLIIFLNENNVPVQLTSISAPEHKFEGLTQIFQKAYEHEQHISESINNIVDHAIKSKDHATFNFLQWYVAEQHEEEVLFKDILDKIELIGNENHGLYLADQYVKGIAKSRKSGS

SEQ ID NO: 440 - protein, 690 aa, synthetic construct
HHHHHHHHGPLEVLFQGPNITNLCPFSQVFNATRFPSVYAWTRERISNCIADYSVLYNSTSFSTFRCYGVSPTKLNDLCFSNVYADSMVVRGDEVRQIAPSQTGVIADYNYKLPDDFTGCVIAWNSKAKDENGQYFYRLFRKSKLLPFQRDVSNVTYGSGKNDGCNPSEADCYWPLLKYGFTGSVSQDYQPYRVVVLSFELLNAPATVCGPGSGGSGSSQCVNLTTRTQLPPAYTNSFTRGVYYPDKVFRSSVLHSTQDLFLPFFSNVTWFHAIHVSGTNGTKRFDNPVLPFNDGVYFASTEKSNIIRGWIFGTTLDSKTQSLLIVNNATNVVIKVCEFQFCNDPFLGVYYHKNNKSWMESEFRVYSSANNCTFEYVSQPFLMDLEGKQGNFKNLREFVFKNIDGYFKIYSKHTPINLVRDLPQGFSALEPLVDLPIGINITRFQTLLALHRSYLTPGDSSSGWTAGAAAYYVGYLQPRTFLLKYNENGTITDAVDCALDPLSETKCTLGSGGGGESQVRQQFSKDIEKLLNEQVNKEMQSSNLYMSMSSWCYTHSLDGAGLFLFDHAAEEYEHAKKLIIFLNENNVPVQLTSISAPEHKFEGLTQIFQKAYEHEQHISESINNIVDHAIKSKDHATFNFLQWYVAEQHEEEVLFKDILDKIELIGNENHGLYLADQYVKGIAKSRKSGS

SEQ ID NO: 441 - protein, 676 aa, synthetic construct
HHHHHHHHGPLEVLFQGPNITNRCPFDKVFNATRFPNVYAWERTKISDCVADYTVLYNSTSFSTFKCYGVSPSKLIDLCFTSVYADTFLIRSSEVRQVAPGETGVIADYNYKLPDDFTGCVIAWNTAKHDTGNYYYRSHRKTKLKPFERDLSSDDGNGVYTLSTYDFNPNVPVAYQATRVVVLSFELLNAPATVCGPGSGGSGSSQCVNLTTRTQLPPAYTNSFTRGVYYPDKVFRSSVLHSTQDLFLPFFSNVTWFHAIHVSGTNGTKRFDNPVLPFNDGVYFASTEKSNIIRGWIFGTTLDSKTQSLLIVNNATNVVIKVCEFQFCNDPFLGVYYHKNNKSWMESEFRVYSSANNCTFEYVSQPFLMDLEGKQGNFKNLREFVFKNIDGYFKIYSKHTPINLVRDLPQGFSALEPLVDLPIGINITRFQTLLALHRSYLTPGDSSSGWTAGAAAYYVGYLQPRTFLLKYNENGTITDAVDCALDPLSETKCTLGSGGGGESQVRQQFSKDIEKLLNEQVNKEMQSSNLYMSMSSWCYTHSLDGAGLFLFDHAAEEYEHAKKLIIFLNENNVPVQLTSISAPEHKFEGLTQIFQKAYEHEQHISESINNIVDHAIKSKDHATFNFLQWYVAEQHEEEVLFKDILDKIELIGNENHGLYLADQYVKGIAKSRKSGS

SEQ ID NO: 442 - protein, 691 aa, synthetic construct
HHHHHHHHGPLEVLFQGPNVTQLCPFSDVFNRTMFPSVYAWERMSIRDCVADYAVLYNSSISFSTFECYGVSPTKLNDLCFSSVYADYFVVRGDDVKQIAPGKTGVIADYNYKLPDDFVGCVLAWNSRHVDNKQGFYYRLFRHGKIKPYQRDMSRELYSPSGTPCTVVGFNCYDPLAHYAFASPGIGIGYQPFRVVVLSFQLLNAPATVCGPGSGGSGSSQCVNLTTRTQLPPAYTNSFTRGVYYPDKVFRSSVLHSTQDLFLPFFSNVTWFHAIHVSGTNGTKRFDNPVLPFNDGVYFASTEKSNIIRGWIFGTTLDSKTQSLLIVNNATNVVIKVCEFQFCNDPFLGVYYHKNNKSWMESEFRVYSSANNCTFEYVSQPFLMDLEGKQGNFKNLREFVFKNIDGYFKIYSKHTPINLVRDLPQGFSALEPLVDLPIGINITRFQTLLALHRSYLTPGDSSSGWTAGAAAYYVGYLQPRTFLLKYNENGTITDAVDCALDPLSETKCTLGSGGGGESQVRQQFSKDIEKLLNEQVNKEMQSSNLYMSMSSWCYTHSLDGAGLFLFDHAAEEYEHAKKLIIFLNENNVPVQLTSISAPEHKFEGLTQIFQKAYEHEQHISESINNIVDHAIKSKDHATFNFLQWYVAEQHEEEVLFKDILDKIELIGNENHGLYLADQYVKGIAKSRKSGS

SEQ ID NO: 443 - protein, 693 aa, synthetic construct
HHHHHHHHGPLEVLFQGPNITNLCPFDEVFNATRFPSVYAWERKKISNCVADYSVLYNSTSFSTFKCYGVSPSKLNDLCFTSVYADSFVIRGDEVRQIAPGQTGVIADYNYKLPDDFTGCVIAWNTANQDSGEGGNPNYYYRSSRKSKLKPFERDLSSDEYNVGSQPCNRMGPNCYRTLSTYDFYPTVGVGYQPYRVVVLSFELLNAPATVCGPGSGGSGSSQCVNLTTRTQLPPAYTNSFTRGVYYPDKVFRSSVLHSTQDLFLPFFSNVTWFHAIHVSGTNGTKRFDNPVLPFNDGVYFASTEKSNIIRGWIFGTTLDSKTQSLLIVNNATNVVIKVCEFQFCNDPFLGVYYHKNNKSWMESEFRVYSSANNCTFEYVSQPFLMDLEGKQGNFKNLREFVFKNIDGYFKIYSKHTPINLVRDLPQGFSALEPLVDLPIGINITRFQTLLALHRSYLTPGDSSSGWTAGAAAYYVGYLQPRTFLLKYNENGTITDAVDCALDPLSETKCTLGSGGGGESQVRQQFSKDIEKLLNEQVNKEMQSSNLYMSMSSWCYTHSLDGAGLFLFDHAAEEYEHAKKLIIFLNENNVPVQLTSISAPEHKFEGLTQIFQKAYEHEQHISESINNIVDHAIKSKDHATFNFLQWYVAEQHEEEVLFKDILDKIELIGNENHGLYLADQYVKGIAKSRKSGS

SEQ ID NO: 444 - protein, 780 aa, synthetic construct
HHHHHHHHGPLEVLFQGPNLPDCNIEEWLTAKSVPSPLNWERKTFSNCNFNLSSLLRFVQADSFSCNNIDASKVYGMCFGSISVDKFAIPNSRQVDLQLGNSGFLQSFNYKIDTTATSCQLYYSLPANNVTINNYNPSSWNRRYGFNDDTVFKPRPAGVLTNHDVVYSQQCFKVPNTFCPCKNNGSCVSSGKGTTNGSGTCPAGTNYRTCENTTWCACSCTPDPITASGPRKCPQKKSLVGVGEHCSGLGVDSDYCGNVSCLCSTDAFLGWSADSCLVNDRCNIFANIILNGINSGTTCSTGSGGSGSSQCVNLTTRTQLPPAYTNSFTRGVYYPDKVFRSSVLHSTQDLFLPFFSNVTWFHAIHVSGTNGTKRFDNPVLPFNDGVYFASTEKSNIIRGWIFGTTLDSKTQSLLIVNNATNVVIKVCEFQFCNDPFLGVYYHKNNKSWMESEFRVYSSANNCTFEYVSQPFLMDLEGKQGNFKNLREFVFKNIDGYFKIYSKHTPINLVRDLPQGFSALEPLVDLPIGINITRFQTLLALHRSYLTPGDSSSGWTAGAAAYYVGYLQPRTFLLKYNENGTITDAVDCALDPLSETKCTLGSGGGGESQVRQQFSKDIEKLLNEQVNKEMQSSNLYMSMSSWCYTHSLDGAGLFLFDHAAEEYEHAKKLIIFLNENNVPVQLTSISAPEHKFEGLTQIFQKAYEHEQHISESINNIVDHAIKSKDHATFNFLQWYVAEQHEEEVLFKDILDKIELIGNENHGLYLADQYVKGIAKSRKSGS

SEQ ID NO: 445 - protein, 706 aa, synthetic construct
HHHHHHHHGPLEVLFQGPQGVECDFSKLFKAAAPQIYNFSRLVFTNCNYNLTKLLSLFQVDEFSCHQISPSALASGCYSSLTVDYFAYPLSMKSYLQIGSAGEISQFNYKQDFSNPTCRILASVPANVSITKPDKYIYISQCYSLSAYSDVDVPHYVNPGQYTSIPCLYLTSSGFDEDGQYFRYNLTQFEGQNYLVATGVTVSMTDNLQMVFVITVQYGTDTNSVCPGSGGSGSSQCVNLTTRTQLPPAYTNSFTRGVYYPDKVFRSSVLHSTQDLFLPFFSNVTWFHAIHVSGTNGTKRFDNPVLPFNDGVYFASTEKSNIIRGWIFGTTLDSKTQSLLIVNNATNVVIKVCEFQFCNDPFLGVYYHKNNKSWMESEFRVYSSANNCTFEYVSQPFLMDLEGKQGNFKNLREFVFKNIDGYFKIYSKHTPINLVRDLPQGFSALEPLVDLPIGINITRFQTLLALHRSYLTPGDSSSGWTAGAAAYYVGYLQPRTFLLKYNENGTITDAVDCALDPLSETKCTLGSGGGGESQVRQQFSKDIEKLLNEQVNKEMQSSNLYMSMSSWCYTHSLDGAGLFLFDHAAEEYEHAKKLIIFLNENNVPVQLTSISAPEHKFEGLTQIFQKAYEHEQHISESINNIVDHAIKSKDHATFNFLQWYVAEQHEEEVLFKDILDKIELIGNENHGLYLADQYVKGIAKSRKSGS

SEQ ID NO: 446 - protein, 705 aa, synthetic construct
HHHHHHHHGPLEVLFQGPELTECDLDVLFKNDAPIIANYSRRVFTNCNYNLTKLLSLVQVDEFVCHKTTPEALATGCYSSLTVDWFALPFSMKSTLAIGSAEAISMFNYNQDYSNPTCRIHAAVTANVSTALNFTANANYAYISRCQGVDGKPILLQPGQMTNIACRSGVLARPSDADYFGYSFQGRNYYLGRKSYKPKTDEGDVQMVYVITPKYDKGPDTVCPLKGSGGSGSSQCVNLTTRTQLPPAYTNSFTRGVYYPDKVFRSSVLHSTQDLFLPFFSNVTWFHAIHVSGTNGTKRFDNPVLPFNDGVYFASTEKSNIIRGWIFGTTLDSKTQSLLIVNNATNVVIKVCEFQFCNDPFLGVYYHKNNKSWMESEFRVYSSANNCTFEYVSQPFLMDLEGKQGNFKNLREFVFKNIDGYFKIYSKHTPINLVRDLPQGFSALEPLVDLPIGINITRFQTLLALHRSYLTPGDSSSGWTAGAAAYYVGYLQPRTFLLKYNENGTITDAVDCALDPLSETKCTLGSGGGGESQVRQQFSKDIEKLLNEQVNKEMQSSNLYMSMSSWCYTHSLDGAGLFLFDHAAEEYEHAKKLIIFLNENNVPVQLTSISAPEHKFEGLTQIFQKAYEHEQHISESINNIVDHAIKSKDHATFNFLQWYVAEQHEEEVLFKDILDKIELIGNENHGLYLADQYVKGIAKSRKSGS

SEQ ID NO: 447 - protein, 701 aa, synthetic construct
HHHHHHHHGPLEVLFQGPVYPDCNFTELFRERAPTIMQYKREVFTRCNYNLSLLLSLVQVDEFVCDKITPEALATGCYSSLTVDWFAFPYAWKSYLAIGSADRIVRFNYNQDYSNPSCRIHSKVNSSIGISYAGAYSYITNCNYGATNKDDVVKPGGRASQQCITGALNSPTTGQLWAYNFGGVPYRVSRLTYTDHLSDPLDMVYVITVKYEPGAETVCPKQGSGGSGSSQCVNLTTRTQLPPAYTNSFTRGVYYPDKVFRSSVLHSTQDLFLPFFSNVTWFHAIHVSGTNGTKRFDNPVLPFNDGVYFASTEKSNIIRGWIFGTTLDSKTQSLLIVNNATNVVIKVCEFQFCNDPFLGVYYHKNNKSWMESEFRVYSSANNCTFEYVSQPFLMDLEGKQGNFKNLREFVFKNIDGYFKIYSKHTPINLVRDLPQGFSALEPLVDLPIGINITRFQTLLALHRSYLTPGDSSSGWTAGAAAYYVGYLQPRTFLLKYNENGTITDAVDCALDPLSETKCTLGSGGGGESQVRQQFSKDIEKLLNEQVNKEMQSSNLYMSMSSWCYTHSLDGAGLFLFDHAAEEYEHAKKLIIFLNENNVPVQLTSISAPEHKFEGLTQIFQKAYEHEQHISESINNIVDHAIKSKDHATFNFLQWYVAEQHEEEVLFKDILDKIELIGNENHGLYLADQYVKGIAKSRKSGS

SEQ ID NO: 448 - protein, 707 aa, synthetic construct
HHHHHHHHGPLEVLFQGPQATECDFSPMLTGVAPQVYNFKRLVFSNCNYNLTKLLSLFAVDEFSCNGISPDAIARGCYSTLTVDYFAYPLSMKSYIRPGSAGNIPLYNYKQSFANPTCRVMASVPANVTITKPDAYGYISKCSRLTGANQDVETPLYINPGEYSICRDFSPGGFSEDGQVFKRTLTQFEGGGLLIGVGTRVPMTDNLQMSFIIFVQYGTGTDSVCPMLGSGGSGSSQCVNLTTRTQLPPAYTNSFTRGVYYPDKVFRSSVLHSTQDLFLPFFSNVTWFHAIHVSGTNGTKRFDNPVLPFNDGVYFASTEKSNIIRGWIFGTTLDSKTQSLLIVNNATNVVIKVCEFQFCNDPFLGVYYHKNNKSWMESEFRVYSSANNCTFEYVSQPFLMDLEGKQGNFKNLREFVFKNIDGYFKIYSKHTPINLVRDLPQGFSALEPLVDLPIGINITRFQTLLALHRSYLTPGDSSSGWTAGAAAYYVGYLQPRTFLLKYNENGTITDAVDCALDPLSETKCTLGSGGGGESQVRQQFSKDIEKLLNEQVNKEMQSSNLYMSMSSWCYTHSLDGAGLFLFDHAAEEYEHAKKLIIFLNENNVPVQLTSISAPEHKFEGLTQIFQKAYEHEQHISESINNIVDHAIKSKDHATFNFLQWYVAEQHEEEVLFKDILDKIELIGNENHGLYLADQYVKGIAKSRKSGS

SEQ ID NO: 449 - protein, 698 aa, synthetic construct
HHHHHHHHGPLEVLFQGPQGVECDFSKLFKAAPPQIYNFSRLVFTNCNYNLTKLLSLFHVSEFSCHQVSPSALASGCYSSLTVDYFAYPLYLASYLQQGSTGEIAQYNYKQDFSNPTCRILASVPANVSIPKPDKYIWLSQCYSFSAYSGDIPHYVQPGQYTPCLYLTSSGFDKSYQTNRDMQNKMAATGVTSSMTDNLQMAFVISVQYGTDTNSVCPMGSGGSGSSQCVNLTTRTQLPPAYTNSFTRGVYYPDKVFRSSVLHSTQDLFLPFFSNVTWFHAIHVSGTNGTKRFDNPVLPFNDGVYFASTEKSNIIRGWIFGTTLDSKTQSLLIVNNATNVVIKVCEFQFCNDPFLGVYYHKNNKSWMESEFRVYSSANNCTFEYVSQPFLMDLEGKQGNFKNLREFVFKNIDGYFKIYSKHTPINLVRDLPQGFSALEPLVDLPIGINITRFQTLLALHRSYLTPGDSSSGWTAGAAAYYVGYLQPRTFLLKYNENGTITDAVDCALDPLSETKCTLGSGGGGESQVRQQFSKDIEKLLNEQVNKEMQSSNLYMSMSSWCYTHSLDGAGLFLFDHAAEEYEHAKKLIIFLNENNVPVQLTSISAPEHKFEGLTQIFQKAYEHEQHISESINNIVDHAIKSKDHATFNFLQWYVAEQHEEEVLFKDILDKIELIGNENHGLYLADQYVKGIAKSRKSGS

SEQ ID NO: 450 - protein, 698 aa, synthetic construct
HHHHHHHHGPLEVLFQGPQGVECDFSKLFKAAPPQIYNFSRLVFTNCNYNLTKLLSLFHVSEFSCHQVSPSALASGCYSSLTVDYFAYPLYLASYLQQGSTGEIAQYNYKQDFSNPTCRILASVPANVSIPKPDKYIWLSQCYSFSAYSGDVPHYVLPGQYTPCLYLTSSGFDNSYQTNRDFQNKMAATGVISSMTDNLQMAFVISVQYGTDTNSVCPMGSGGSGSSQCVNLTTRTQLPPAYTNSFTRGVYYPDKVFRSSVLHSTQDLFLPFFSNVTWFHAIHVSGTNGTKRFDNPVLPFNDGVYFASTEKSNIIRGWIFGTTLDSKTQSLLIVNNATNVVIKVCEFQFCNDPFLGVYYHKNNKSWMESEFRVYSSANNCTFEYVSQPFLMDLEGKQGNFKNLREFVFKNIDGYFKIYSKHTPINLVRDLPQGFSALEPLVDLPIGINITRFQTLLALHRSYLTPGDSSSGWTAGAAAYYVGYLQPRTFLLKYNENGTITDAVDCALDPLSETKCTLGSGGGGESQVRQQFSKDIEKLLNEQVNKEMQSSNLYMSMSSWCYTHSLDGAGLFLFDHAAEEYEHAKKLIIFLNENNVPVQLTSISAPEHKFEGLTQIFQKAYEHEQHISESINNIVDHAIKSKDHATFNFLQWYVAEQHEEEVLFKDILDKIELIGNENHGLYLADQYVKGIAKSRKSGS

SEQ ID NO: 451 - protein, 696 aa, synthetic construct
HHHHHHHHGPLEVLFQGPTTQECDFTPMLTGTPPPIYNFKRLVFTNCNYNLTKLLSLFQVSEFSCHQVSPSSLATGCYSSLTVDYFAYSTDMSSYLQPGSAGAIVQFNYKQDFSNPTCRVLATVPQNLTTITKPSNYAYLTECYKTSAYGKNYLYNAPGAYTPCLSLASRGFSTKYQSHSDGELTTTGYIYPVTGNLQMAFIISVQYGTDTNSVCPMGSGGSGSSQCVNLTTRTQLPPAYTNSFTRGVYYPDKVFRSSVLHSTQDLFLPFFSNVTWFHAIHVSGTNGTKRFDNPVLPFNDGVYFASTEKSNIIRGWIFGTTLDSKTQSLLIVNNATNVVIKVCEFQFCNDPFLGVYYHKNNKSWMESEFRVYSSANNCTFEYVSQPFLMDLEGKQGNFKNLREFVFKNIDGYFKIYSKHTPINLVRDLPQGFSALEPLVDLPIGINITRFQTLLALHRSYLTPGDSSSGWTAGAAAYYVGYLQPRTFLLKYNENGTITDAVDCALDPLSETKCTLGSGGGGESQVRQQFSKDIEKLLNEQVNKEMQSSNLYMSMSSWCYTHSLDGAGLFLFDHAAEEYEHAKKLIIFLNENNVPVQLTSISAPEHKFEGLTQIFQKAYEHEQHISESINNIVDHAIKSKDHATFNFLQWYVAEQHEEEVLFKDILDKIELIGNENHGLYLADQYVKGIAKSRKSGS

SEQ ID NO: 452 - protein, 706 aa, synthetic construct
HHHHHHHHGPLEVLFQGPEGVECDFSPLLSGTPPQVYNFKRLVFTNCNYNLTKLLSLFSVNDFTCSQISPAAIASNCYSSLILDYFSYPLSMKSDLSVSSAGPISQFNYKQSFSNPTCLILATVPHNLTTITKPLKYSYINKCSRFLSDDRTEVPQLVNANQYSPCVSIVPSTVWEDGDYYRKQLSPLEGGGWLVASGSTVAMTEQLQMGFGITVQYGTDTNSVCPKGSGGSGSSQCVNLTTRTQLPPAYTNSFTRGVYYPDKVFRSSVLHSTQDLFLPFFSNVTWFHAIHVSGTNGTKRFDNPVLPFNDGVYFASTEKSNIIRGWIFGTTLDSKTQSLLIVNNATNVVIKVCEFQFCNDPFLGVYYHKNNKSWMESEFRVYSSANNCTFEYVSQPFLMDLEGKQGNFKNLREFVFKNIDGYFKIYSKHTPINLVRDLPQGFSALEPLVDLPIGINITRFQTLLALHRSYLTPGDSSSGWTAGAAAYYVGYLQPRTFLLKYNENGTITDAVDCALDPLSETKCTLGSGGGGESQVRQQFSKDIEKLLNEQVNKEMQSSNLYMSMSSWCYTHSLDGAGLFLFDHAAEEYEHAKKLIIFLNENNVPVQLTSISAPEHKFEGLTQIFQKAYEHEQHISESINNIVDHAIKSKDHATFNFLQWYVAEQHEEEVLFKDILDKIELIGNENHGLYLADQYVKGIAKSRKSGS

SEQ ID NO: 453 - protein, 706 aa, synthetic construct
HHHHHHHHGPLEVLFQGPEGVECDFSPLLSGTPPQVYNFKRLVFTNCNYNLTKLLSLFSVNDFTCSQISPAAIASNCYSSLILDYFSYPLSMKSDLSVSSAGPISQFNYKQSFSNPTCLILATVPHNLTTITKPLKYSYINKCSRLLSDDRTEVPQLVNANQYSPCVSIVPSTVWEDGDYYRKQLSPLEGGGWLVASGSTVAMTEQLQMGFGITVQYGTDTNSVCPKGSGGSGSSQCVNLTTRTQLPPAYTNSFTRGVYYPDKVFRSSVLHSTQDLFLPFFSNVTWFHAIHVSGTNGTKRFDNPVLPFNDGVYFASTEKSNIIRGWIFGTTLDSKTQSLLIVNNATNVVIKVCEFQFCNDPFLGVYYHKNNKSWMESEFRVYSSANNCTFEYVSQPFLMDLEGKQGNFKNLREFVFKNIDGYFKIYSKHTPINLVRDLPQGFSALEPLVDLPIGINITRFQTLLALHRSYLTPGDSSSGWTAGAAAYYVGYLQPRTFLLKYNENGTITDAVDCALDPLSETKCTLGSGGGGESQVRQQFSKDIEKLLNEQVNKEMQSSNLYMSMSSWCYTHSLDGAGLFLFDHAAEEYEHAKKLIIFLNENNVPVQLTSISAPEHKFEGLTQIFQKAYEHEQHISESINNIVDHAIKSKDHATFNFLQWYVAEQHEEEVLFKDILDKIELIGNENHGLYLADQYVKGIAKSRKSGS

SEQ ID NO: 454 - protein, 395 aa, synthetic construct
HHHHHHHHGPLEVLFQGPNITNLCPFDEVFNATRFPSVYAWERKKISNCVADYSVLYNSTSFSTFKCYGVSPSKLNDLCFTSVYADSFVIRGDEVRQIAPGQTGVIADYNYKLPDDFTGCVIAWNTANQDSGEGGNPNYYYRSSRKSKLKPFERDLSSDEYNVGSQPCNRMGPNCYRTLSTYDFYPTVGVGYQPYRVVVLSFELLNAPATVCGPGSGGGGESQVRQQFSKDIEKLLNEQVNKEMQSSNLYMSMSSWCYTHSLDGAGLFLFDHAAEEYEHAKKLIIFLNENNVPVQLTSISAPEHKFEGLTQIFQKAYEHEQHISESINNIVDHAIKSKDHATFNFLQWYVAEQHEEEVLFKDILDKIELIGNENHGLYLADQYVKGIAKSRKSGS

SEQ ID NO: 455 - protein, 395 aa, synthetic construct
HHHHHHHHGPLEVLFQGPNITNLCPFDEVFNATRFPSVYAWERKKISNCVADYSVLYNSTSFSTFKCYGVSPSKLNDLCFTSVYADSFVIRGDEVRQIAPGQTGVIADYNYKLPDDFTGCVIAWNTANQDSGEGGNPNYYRRSSRKSKLKPFERDLSSDEYNVGSQPCNRMGPNCYRTLSTYDFYPTVGVGYQPYRVVVLSFENKSAPATVCGPGSGGGGESQVRQQFSKDIEKLLNEQVNKEMQSSNLYMSMSSWCYTHSLDGAGLFLFDHAAEEYEHAKKLIIFLNENNVPVQLTSISAPEHKFEGLTQIFQKAYEHEQHISESINNIVDHAIKSKDHATFNFLQWYVAEQHEEEVLFKDILDKIELIGNENHGLYLADQYVKGIAKSRKSGS

SEQ ID NO: 456 - protein, 610 aa, synthetic construct
HHHHHHHHGPLEVLFQGPNITNLCPFDEVFNATRFPSVYAWERKKISNCVADYSVLYNSTSFSTFKCYGVSPSKLNDLCFTSVYADSFVIRGDEVRQIAPGQTGVIADYNYKLPDDFTGCVIAWNTANQDSGEGGNPNYYYRSSRKSKLKPFERDLSSDEYNVGSQPCNRMGPNCYRTLSTYDFYPTVGVGYQPYRVVVLSFELLNAPATVCGPGSGGSGEGVECDFSPLLSGTPPQVYNFKRLVFTNCNYNLTKLLSLFSVNDFTCSQISPAAIASNCYSSLILDYFSYPLSMKSDLSVSSAGPISQFNYKQSFSNPTCLILATVPHNLTTITKPLKYSYINKCSRLLSDDRTEVPQLVNANQYSPCVSIVPSTVWEDGDYYRKQLSPLEGGGWLVASGSTVAMTEQLQMGFGITVQNGTDTNSVCPKGSGGGGESQVRQQFSKDIEKLLNEQVNKEMQSSNLYMSMSSWCYTHSLDGAGLFLFDHAAEEYEHAKKLIIFLNENNVPVQLTSISAPEHKFEGLTQIFQKAYEHEQHISESINNIVDHAIKSKDHATFNFLQWYVAEQHEEEVLFKDILDKIELIGNENHGLYLADQYVKGIAKSRKSGS

SEQ ID NO: 457 - protein, 610 aa, synthetic construct
HHHHHHHHGPLEVLFQGPNITNLCPFDEVFNATRFPSVYAWERKKISNCVADYSVLYNSTSFSTFKCYGVSPSKLNDLCFTSVYADSFVIRGDEVRQIAPGQTGVIADYNYKLPDDFTGCVIAWNTANQDSGEGGNPNYYRRSSRKSKLKPFERDLSSDEYNVGSQPCNRMGPNCYRTLSTYDFYPTVGVGYQPYRVVVLSFENKSAPATVCGPGSGGSGEGVECDFSPLLSGTPPQVYNFKRLVFTNCNYNLTKLLSLFSVNDFTCSQISPAAIASNCYSSLILDYFSYPLSMKSDLSVSSAGPISQFNYKQSFSNPTCLILATVPHNLTTITKPLKYSYINKCSRLLSDDRTEVPQLVNANQYSPCVSIVPSTVWEDGDYYRKQLSPLEGGGWLVASGSTVAMTEQLQMGFGITVQNGTDTNSVCPKGSGGGGESQVRQQFSKDIEKLLNEQVNKEMQSSNLYMSMSSWCYTHSLDGAGLFLFDHAAEEYEHAKKLIIFLNENNVPVQLTSISAPEHKFEGLTQIFQKAYEHEQHISESINNIVDHAIKSKDHATFNFLQWYVAEQHEEEVLFKDILDKIELIGNENHGLYLADQYVKGIAKSRKSGS

SEQ ID NO: 458 - protein, 610 aa, synthetic construct
HHHHHHHHGPLEVLFQGPEGVECDFSPLLSGTPPQVYNFKRLVFTNCNYNLTKLLSLFSVNDFTCSQISPAAIASNCYSSLILDYFSYPLSMKSDLSVSSAGPISQFNYKQSFSNPTCLILATVPHNLTTITKPLKYSYINKCSRLLSDDRTEVPQLVNANQYSPCVSIVPSTVWEDGDYYRKQLSPLEGGGWLVASGSTVAMTEQLQMGFGITVQNGTDTNSVCPKGSGGSGNITNLCPFDEVFNATRFPSVYAWERKKISNCVADYSVLYNSTSFSTFKCYGVSPSKLNDLCFTSVYADSFVIRGDEVRQIAPGQTGVIADYNYKLPDDFTGCVIAWNTANQDSGEGGNPNYYYRSSRKSKLKPFERDLSSDEYNVGSQPCNRMGPNCYRTLSTYDFYPTVGVGYQPYRVVVLSFELLNAPATVCGPGSGGGGESQVRQQFSKDIEKLLNEQVNKEMQSSNLYMSMSSWCYTHSLDGAGLFLFDHAAEEYEHAKKLIIFLNENNVPVQLTSISAPEHKFEGLTQIFQKAYEHEQHISESINNIVDHAIKSKDHATFNFLQWYVAEQHEEEVLFKDILDKIELIGNENHGLYLADQYVKGIAKSRKSGS

SEQ ID NO: 459 - protein, 610 aa, synthetic construct
HHHHHHHHGPLEVLFQGPEGVECDFSPLLSGTPPQVYNFKRLVFTNCNYNLTKLLSLFSVNDFTCSQISPAAIASNCYSSLILDYFSYPLSMKSDLSVSSAGPISQFNYKQSFSNPTCLILATVPHNLTTITKPLKYSYINKCSRLLSDDRTEVPQLVNANQYSPCVSIVPSTVWEDGDYYRKQLSPLEGGGWLVASGSTVAMTEQLQMGFGITVQNGTDTNSVCPKGSGGSGNITNLCPFDEVFNATRFPSVYAWERKKISNCVADYSVLYNSTSFSTFKCYGVSPSKLNDLCFTSVYADSFVIRGDEVRQIAPGQTGVIADYNYKLPDDFTGCVIAWNTANQDSGEGGNPNYYRRSSRKSKLKPFERDLSSDEYNVGSQPCNRMGPNCYRTLSTYDFYPTVGVGYQPYRVVVLSFENKSAPATVCGPGSGGGGESQVRQQFSKDIEKLLNEQVNKEMQSSNLYMSMSSWCYTHSLDGAGLFLFDHAAEEYEHAKKLIIFLNENNVPVQLTSISAPEHKFEGLTQIFQKAYEHEQHISESINNIVDHAIKSKDHATFNFLQWYVAEQHEEEVLFKDILDKIELIGNENHGLYLADQYVKGIAKSRKSGS

SEQ ID NO: 460 - protein, 610 aa, synthetic construct
HHHHHHHHGPLEVLFQGPNITNLCPFDEVFNATRFPSVYAWERKKISNCVADYSVLYNSTSFSTFKCYGVSPSKLNDLCFTSVYADSFVIRGDEVRQIAPGQTGVIADYNYKLPDDFTGCVIAWNTANQDSGEGGNPNYYYRSSRKSKLKPFERDLSSDEYNVGSQPCNRMGPNCYRTLSTYDFYPTVGVGYQPYRVVVLSFELLNAPATVCGPGSGGSGEGVECDFSPLLSGTPPQVYNFKRLVFTNCNYNLTKLLSLFSVNDFTCSQISPAAIASNCYSSLILDYFSYPLSMKSDLSVSSAGPISQFNYKQSFSNPTCLILATVPHNLTTITKPLKYSYINKCSRLLSDDRTEVPQLVNANQYSPCVSIVPSTVAEDGDYYRKQLSPLEGGGWLVASGSTVAMTEQLQMGFGITVQNGTDTNSVCPKGSGGGGESQVRQQFSKDIEKLLNEQVNKEMQSSNLYMSMSSWCYTHSLDGAGLFLFDHAAEEYEHAKKLIIFLNENNVPVQLTSISAPEHKFEGLTQIFQKAYEHEQHISESINNIVDHAIKSKDHATFNFLQWYVAEQHEEEVLFKDILDKIELIGNENHGLYLADQYVKGIAKSRKSGS

SEQ ID NO: 461 - protein, 610 aa, synthetic construct
HHHHHHHHGPLEVLFQGPNITNLCPFDEVFNATRFPSVYAWERKKISNCVADYSVLYNSTSFSTFKCYGVSPSKLNDLCFTSVYADSFVIRGDEVRQIAPGQTGVIADYNYKLPDDFTGCVIAWNTANQDSGEGGNPNYYRRSSRKSKLKPFERDLSSDEYNVGSQPCNRMGPNCYRTLSTYDFYPTVGVGYQPYRVVVLSFENKSAPATVCGPGSGGSGEGVECDFSPLLSGTPPQVYNFKRLVFTNCNYNLTKLLSLFSVNDFTCSQISPAAIASNCYSSLILDYFSYPLSMKSDLSVSSAGPISQFNYKQSFSNPTCLILATVPHNLTTITKPLKYSYINKCSRLLSDDRTEVPQLVNANQYSPCVSIVPSTVAEDGDYYRKQLSPLEGGGWLVASGSTVAMTEQLQMGFGITVQNGTDTNSVCPKGSGGGGESQVRQQFSKDIEKLLNEQVNKEMQSSNLYMSMSSWCYTHSLDGAGLFLFDHAAEEYEHAKKLIIFLNENNVPVQLTSISAPEHKFEGLTQIFQKAYEHEQHISESINNIVDHAIKSKDHATFNFLQWYVAEQHEEEVLFKDILDKIELIGNENHGLYLADQYVKGIAKSRKSGS

SEQ ID NO: 462 - protein, 610 aa, synthetic construct
HHHHHHHHGPLEVLFQGPEGVECDFSPLLSGTPPQVYNFKRLVFTNCNYNLTKLLSLFSVNDFTCSQISPAAIASNCYSSLILDYFSYPLSMKSDLSVSSAGPISQFNYKQSFSNPTCLILATVPHNLTTITKPLKYSYINKCSRLLSDDRTEVPQLVNANQYSPCVSIVPSTVAEDGDYYRKQLSPLEGGGWLVASGSTVAMTEQLQMGFGITVQNGTDTNSVCPKGSGGSGNITNLCPFDEVFNATRFPSVYAWERKKISNCVADYSVLYNSTSFSTFKCYGVSPSKLNDLCFTSVYADSFVIRGDEVRQIAPGQTGVIADYNYKLPDDFTGCVIAWNTANQDSGEGGNPNYYYRSSRKSKLKPFERDLSSDEYNVGSQPCNRMGPNCYRTLSTYDFYPTVGVGYQPYRVVVLSFELLNAPATVCGPGSGGGGESQVRQQFSKDIEKLLNEQVNKEMQSSNLYMSMSSWCYTHSLDGAGLFLFDHAAEEYEHAKKLIIFLNENNVPVQLTSISAPEHKFEGLTQIFQKAYEHEQHISESINNIVDHAIKSKDHATFNFLQWYVAEQHEEEVLFKDILDKIELIGNENHGLYLADQYVKGIAKSRKSGS

SEQ ID NO: 463 - protein, 610 aa, synthetic construct
HHHHHHHHGPLEVLFQGPEGVECDFSPLLSGTPPQVYNFKRLVFTNCNYNLTKLLSLFSVNDFTCSQISPAAIASNCYSSLILDYFSYPLSMKSDLSVSSAGPISQFNYKQSFSNPTCLILATVPHNLTTITKPLKYSYINKCSRLLSDDRTEVPQLVNANQYSPCVSIVPSTVAEDGDYYRKQLSPLEGGGWLVASGSTVAMTEQLQMGFGITVQNGTDTNSVCPKGSGGSGNITNLCPFDEVFNATRFPSVYAWERKKISNCVADYSVLYNSTSFSTFKCYGVSPSKLNDLCFTSVYADSFVIRGDEVRQIAPGQTGVIADYNYKLPDDFTGCVIAWNTANQDSGEGGNPNYYRRSSRKSKLKPFERDLSSDEYNVGSQPCNRMGPNCYRTLSTYDFYPTVGVGYQPYRVVVLSFENKSAPATVCGPGSGGGGESQVRQQFSKDIEKLLNEQVNKEMQSSNLYMSMSSWCYTHSLDGAGLFLFDHAAEEYEHAKKLIIFLNENNVPVQLTSISAPEHKFEGLTQIFQKAYEHEQHISESINNIVDHAIKSKDHATFNFLQWYVAEQHEEEVLFKDILDKIELIGNENHGLYLADQYVKGIAKSRKSGS

SEQ ID NO: 464 - protein, 409 aa, synthetic construct
HHHHHHHHGPLEVLFQGPQGVECDFSKLFKAAAPQIYNFSRLVFTNCNYNLTKLLSLFQVDEFSCHQISPSALASGCYSSLTVDYFAYPLSMKSYLQIGSAGEISQFNYKQDFSNPTCRILASVPANVSITKPDKYIYISQCYSLSAYSDVDVPHYVNPGQYTSIPCLYLTSSGFDEDGQYFRYNLTQFEGQNYLVATGVTVSMTDNLQMVFVITVQYGTDTNSVCPGGSGGGGESQVRQQFSKDIEKLLNEQVNKEMQSSNLYMSMSSWCYTHSLDGAGLFLFDHAAEEYEHAKKLIIFLNENNVPVQLTSISAPEHKFEGLTQIFQKAYEHEQHISESINNIVDHAIKSKDHATFNFLQWYVAEQHEEEVLFKDILDKIELIGNENHGLYLADQYVKGIAKSRKSGS

SEQ ID NO: 465 - protein, 409 aa, synthetic construct
HHHHHHHHGPLEVLFQGPQGVECDFSKLFKAAAPQIYNFSRLVFTNCNYNLTKLLSLFQVDEFSCHQISPSALASGCYSSLTVDYFAYPLSMKSYLQIGSAGEISQFNYKQDFSNPTCRILASVPANVSITKPDKYIYISQCYSLSAYSDVDVPHYVNPGQYTSIPCLYLTSSGFDEDGQYFRYNLTQFEGQNYLVATGVTVSMTDNLQMVFVITVQNGTDTNSVCPGGSGGGGESQVRQQFSKDIEKLLNEQVNKEMQSSNLYMSMSSWCYTHSLDGAGLFLFDHAAEEYEHAKKLIIFLNENNVPVQLTSISAPEHKFEGLTQIFQKAYEHEQHISESINNIVDHAIKSKDHATFNFLQWYVAEQHEEEVLFKDILDKIELIGNENHGLYLADQYVKGIAKSRKSGS

SEQ ID NO: 466 - protein, 409 aa, synthetic construct
HHHHHHHHGPLEVLFQGPQGVECDFSKLFKAAAPQIYNFSRLVFTNCNYNLTKLLSLFQVDEFSCHQISPSALASGCYSSLTVDYFAYPLSMKSYLQIGSAGEISQFNYKQDFSNPTCRILASVPANVSITKPDKYIYISQCYSRSAYSDVDVPHYVNPGQYTSIPCLYLTSSGFDEDGQYFRYNLTQFEGQNYLVATGVTVSMTDNLQMVFVITVQNGTDTNSVCPGGSGGGGESQVRQQFSKDIEKLLNEQVNKEMQSSNLYMSMSSWCYTHSLDGAGLFLFDHAAEEYEHAKKLIIFLNENNVPVQLTSISAPEHKFEGLTQIFQKAYEHEQHISESINNIVDHAIKSKDHATFNFLQWYVAEQHEEEVLFKDILDKIELIGNENHGLYLADQYVKGIAKSRKSGS

SEQ ID NO: 467 - protein, 409 aa, synthetic construct
HHHHHHHHGPLEVLFQGPQGVECDFSKLFKAAAPQIYNFSRLVFTNCNYNLTKLLSLFQVDEFSCHQISPSALASGCYSSLTVDYFAYPLSMKSYLQIGSAGEISQFNYKQDFSNPTCRILASVPANVSITKPDKYIYISQCYSRSAYSDVDVPHYVNPGQRTSIPCLYLTSSGFDEDGQYFRYNLTQFEGQNYLVATGVTVSMTDNLQMVFVITVQNGTDTNSVCPGGSGGGGESQVRQQFSKDIEKLLNEQVNKEMQSSNLYMSMSSWCYTHSLDGAGLFLFDHAAEEYEHAKKLIIFLNENNVPVQLTSISAPEHKFEGLTQIFQKAYEHEQHISESINNIVDHAIKSKDHATFNFLQWYVAEQHEEEVLFKDILDKIELIGNENHGLYLADQYVKGIAKSRKSGS

SEQ ID NO: 468 - protein, 1395 aa, synthetic construct
YVDVGPDSVKSACIEVDIQQTFFDKTWPRPIDVSKADGIIYPQGRTYSNITITYQGLFPYQGDHGDMYVYSAGHATGTTPQKLFVANYSQDVKQFANGFVVRIGAAANSTGTVIISPSTSATIRKIYPAFMLGSSVGNFSDGKMGRFFNHTLVLLPDGCGTLLRAFYCILEPRSGNHCPAGNSYTSFATYHTPATDCSDGNYNRNASLNSFKEYFNLRNCTFMYTYNITEDEILEWFGITQTAQGVHLFSSRYVDLYGGNMFQFATLPVYDTIKYYSIIPHSIRSIQSDRKAWAAFYVYKLQPLTFLLDFSVDGYIRRAIDCGFNDLSQLHCSYESFDVESGVYSVSSFEAKPSGSVVEQAEGVECDFSPLLSGTPPQVYNFKRLVFTNCNYNLTKLLSLFSVNDFTCSQISPAAIASNCYSSLILDYFSYPLSMKSDLSVSSAGPISQFNYKQSFSNPTCLILATVPHNLTTITKPLKYSYINKCSRFLSDDRTEVPQLVNANQYSPCVSIVPSTVWEDGDYYRKQLSPLEGGGWLVASGSTVAMTEQLQMGFGITVQYGTDTNSVCPKLEFANDTKIASQLGNCVEYSLYGVSGRGVFQNCTAVGVRQQRFVYDAYQNLVGYYSDDGNYYCLRACVSVPVSVIYDKETKTHATLFGSVACEHISSTMSQYSRSTRSMLKRRDSTYGPLQTPVGCVLGLVNSSLFVEDCKLPLGQSLCALPDTPSTLTPASVGSVPGEMRLASIAFNHPIQVDQLNSSYFKLSIPTNFSFGVTQEYIQTTIQKVTVDCKQYVCNGFQKCEQLLREYGQFCSKINQALHGANLRQDDSVRNLFASVKSSQSSPIIPGFGGDFNLTLLEPVSISTGSRSARSAIEDLLFDKVTIADPGYMQGYDDCMQQGPASARDLICAQYVAGYKVLPPLMDVNMEAAYTSSLLGSIAGVGWTAGLSSFAAIPFAQSIFYRLNGVGITQQVLSENQKLIANKFNQALGAMQTGFTTTNEAFHKVQDAVNNNAQALSKLASELSNTFGAISASIGDIIQRLDPPEQDAQIDRLINGRLTTLNAFVAQQLVRSESAALSAQLAKDKVNECVKAQSKRSGFCGQGTHIVSFVVNAPNGLYFMHVGYYPSNHIEVVSAYGLCDAANPTNCIAPVNGYFIKTNNTRIVDEWSYTGSSFYAPEPITSLNTKYVAPQVTYQNISTNLPPPLLGNSTGIDFQDELDEIHKQGSGGSGDIIKLLNEQVNKEMQSSNLYMSMSSWCYTHSLDGAGLFLFDHAAEEYEHAKKLIIFLNENNVPVQLTSISAPEHKFEGLTQIFQKAYEHEQHISESINNIVDHAIKSKDHATFNFLQWYVAEQHEEEVLFKDILDKIELIGNENHGLYLADQYVKGIAKSRKSGS

SEQ ID NO: 469 - protein, 1395 aa, synthetic construct
YVDVGPDSVKSACIEVDIQQTFFDKTWPRPIDVSKADGIIYPQGRTYSNITITYQGLFPYQGDHGDMYVYSAGHATGTTPQKLFVANYSQDVKQFANGFVVRIGAAANSTGTVIISPSTSATIRKIYPAFMLGSSVGNFSDGKMGRFFNHTLVLLPDGCGTLLRAFYCILEPRSGNHCPAGNSYTSFATYHTPATDCSDGNYNRNASLNSFKEYFNLRNCTFMYTYNITEDEILEWFGITQTAQGVHLFSSRYVDLYGGNMFQFATLPVYDTIKYYSIIPHSIRSIQSDRKAWAAFYVYKLQPLTFLLDFSVDGYIRRAIDCGFNDLSQLHCSYESFDVESGVYSVSSFEAKPSGSVVEQAEGVECDFSPLLSGTPPQVYNFKRLVFTNCNYNLTKLLSLFSVNDFTCSQISPAAIASNCYSSLILDYFSYPLSMKSDLSVSSAGPISQFNYKQSFSNPTCLILATVPHNLTTITKPLKYSYINKCSRFLSDDRTEVPQLVNANQYSPCVSIVPSTVWEDGDYYRKQLSPLEGGGWLVASGSTVAMTEQLQMGFGITVQYGTDTNSVCPKLEFANDTKIASQLGNCVEYSLYGVSGRGVFQNCTAVGVRQQRFVYDAYQNLVGYYSDDGNYYCLRACVSVPVSVIYDKETKTHATLFGSVACEHISSTMSQYSRSTRSMLKRRDSTYGPLQTPVGCVLGLVNSSLFVEDCKLPLGQSLCALPDTPSTLTPASVGSVPGEMRLASIAFNHPIQVDQLNSSYFKLSIPTNFSFGVTQEYIQTTIQKVTVDCKQYVCNGFQKCEQLLREYGQFCSKINQALHGANLRQDDSVRNLFASVKSSQSSPIIPGFGGDFNLTLLEPVSISTGSRSARSAIEDLLFDKVTIADPGYMQGYDDCMQQGPASARDLICAQYVAGYKVLPPLMDVNMEAAYTSSLLGSIAGVGWTAGLSSFAAIPFAQSIFYRLNGVGITQQVLSENQKLIANKFNQALGAMQTGFTTTNEAFHKVQDAVNNNAQALSKLASELSNTFGAISASIGDIIQRLDPPEQDAQIDRLINGRLTTLNAFVAQQLVRSESAALSAQLAKDKVNECVKAQSKRSGFCGQGTHIVSFVVNAPNGLYFMHVGYYPSNHIEVVSAYGLCDAANPTNCIAPVNGYFIKTNNTRIVDEWSYTGSSFYAPEPITSLNTKYVAPQVTYQNISTNLPPPLLGNSTGIDFQDELDEIHKNGSGGSGDIIKLLNEQVNKEMQSSNLYMSMSSWCYTHSLDGAGLFLFDHAAEEYEHAKKLIIFLNENNVPVQLTSISAPEHKFEGLTQIFQKAYEHEQHISESINNIVDHAIKSKDHATFNFLQWYVAEQHEEEVLFKDILDKIELIGNENHGLYLADQYVKGIAKSRKSGS

SEQ ID NO: 470 - protein, 1395 aa, synthetic construct
YVDVGPDSVKSACIEVDIQQTFFDKTWPRPIDVSKADGIIYPQGRTYSNITITYQGLFPYQGDHGDMYVYSAGHATGTTPQKLFVANYSQDVKQFANGFVVRIGAAANSTGTVIISPSTSATIRKIYPAFMLGSSVGNFSDGKMGRFFNHTLVLLPDGCGTLLRAFYCILEPRSGNHCPAGNSYTSFATYHTPATDCSDGNYNRNASLNSFKEYFNLRNCTFMYTYNITEDEILEWFGITQTAQGVHLFSSRYVDLYGGNMFQFATLPVYDTIKYYSIIPHSIRSIQSDRKAWAAFYVYKLQPLTFLLDFSVDGYIRRAIDCGFNDLSQLHCSYESFDVESGVYSVSSFEAKPSGSVVEQAEGVECDFSPLLSGTPPQVYNFKRLVFTNCNYNLTKLLSLFSVNDFTCSQISPAAIASNCYSSLILDYFSYPLSMKSDLSVSSAGPISQFNYKQSFSNPTCLILATVPHNLTTITKPLKYSYINKCSRFLSDDRTEVPQLVNANQYSPCVSIVPSTVWEDGDYYRKQLSPLEGGGWLVASGSTVAMTEQLQMGFGITVQYGTDTNSVCPKLEFANDTKIASQLGNCVEYSLYGVSGRGVFQNCTAVGVRQQRFVYDAYQNLVGYYSDDGNYYCLRACVSVPVSVIYDKETKTHATLFGSVACEHISSTMSQYSRSTRSMLKRRDSTYGPLQTPVGCVLGLVNSSLFVEDCKLPLGQSLCALPDTPSTLTPASVGSVPGEMRLASIAFNHPIQVDQLNSSYFKLSIPTNFSFGVTQEYIQTTIQKVTVDCKQYVCNGFQKCEQLLREYGQFCSKINQALHGANLRQDDSVRNLFASVKSSQSSPIIPGFGGDFNLTLLEPVSISTGSRSARSAIEDLLFDKVTIADPGYMQGYDDCMQQGPASARDLICAQYVAGYKVLPPLMDVNMEAAYTSSLLGSIAGVGWTAGLSSFAAIPFAQSIFYRLNGVGITQQVLSENQKLIANKFNQALGAMQTGFTTTNEAFHKVQDAVNNNAQALSKLASELSNTFGAISASIGDIIQRLDPPEQDAQIDRLINGRLTTLNAFVAQQLVRSESAALSAQLAKDKVNECVKAQSKRSGFCGQGTHIVSFVVNAPNGLYFMHVGYYPSNHIEVVSAYGLCDAANPTNCIAPVNGYFIKTNNTRIVDEWSYTGSSFYAPEPITSLNTKYVAPQVTYQNISTNLPPPLLGNSELQDIQDELDEIHKQGSGGSGDIIKLLNEQVNKEMQSSNLYMSMSSWCYTHSLDGAGLFLFDHAAEEYEHAKKLIIFLNENNVPVQLTSISAPEHKFEGLTQIFQKAYEHEQHISESINNIVDHAIKSKDHATFNFLQWYVAEQHEEEVLFKDILDKIELIGNENHGLYLADQYVKGIAKSRKSGS

SEQ ID NO: 471 - protein, 1395 aa, synthetic construct
YVDVGPDSVKSACIEVDIQQTFFDKTWPRPIDVSKADGIIYPQGRTYSNITITYQGLFPYQGDHGDMYVYSAGHATGTTPQKLFVANYSQDVKQFANGFVVRIGAAANSTGTVIISPSTSATIRKIYPAFMLGSSVGNFSDGKMGRFFNHTLVLLPDGCGTLLRAFYCILEPRSGNHCPAGNSYTSFATYHTPATDCSDGNYNRNASLNSFKEYFNLRNCTFMYTYNITEDEILEWFGITQTAQGVHLFSSRYVDLYGGNMFQFATLPVYDTIKYYSIIPHSIRSIQSDRKAWAAFYVYKLQPLTFLLDFSVDGYIRRAIDCGFNDLSQLHCSYESFDVESGVYSVSSFEAKPSGSVVEQAEGVECDFSPLLSGTPPQVYNFKRLVFTNCNYNLTKLLSLFSVNDFTCSQISPAAIASNCYSSLILDYFSYPLSMKSDLSVSSAGPISQFNYKQSFSNPTCLILATVPHNLTTITKPLKYSYINKCSRFLSDDRTEVPQLVNANQYSPCVSIVPSTVWEDGDYYRKQLSPLEGGGWLVASGSTVAMTEQLQMGFGITVQYGTDTNSVCPKLEFANDTKIASQLGNCVEYSLYGVSGRGVFQNCTAVGVRQQRFVYDAYQNLVGYYSDDGNYYCLRACVSVPVSVIYDKETKTHATLFGSVACEHISSTMSQYSRSTRSMLKRRDSTYGPLQTPVGCVLGLVNSSLFVEDCKLPLGQSLCALPDTPSTLTPASVGSVPGEMRLASIAFNHPIQVDQLNSSYFKLSIPTNFSFGVTQEYIQTTIQKVTVDCKQYVCNGFQKCEQLLREYGQFCSKINQALHGANLRQDDSVRNLFASVKSSQSSPIIPGFGGDFNLTLLEPVSISTGSRSARSAIEDLLFDKVTIADPGYMQGYDDCMQQGPASARDLICAQYVAGYKVLPPLMDVNMEAAYTSSLLGSIAGVGWTAGLSSFAAIPFAQSIFYRLNGVGITQQVLSENQKLIANKFNQALGAMQTGFTTTNEAFHKVQDAVNNNAQALSKLASELSNTFGAISASIGDIIQRLDPPEQDAQIDRLINGRLTTLNAFVAQQLVRSESAALSAQLAKDKVNECVKAQSKRSGFCGQGTHIVSFVVNAPNGLYFMHVGYYPSNHIEVVSAYGLCDAANPTNCIAPVNGYFIKTNNTRIVDEWSYTGSSFYAPEPITSLNTKYVAPQVTYQNISTNLPPPLLGNSELQDIQDELDEIHKNGSGGSGDIIKLLNEQVNKEMQSSNLYMSMSSWCYTHSLDGAGLFLFDHAAEEYEHAKKLIIFLNENNVPVQLTSISAPEHKFEGLTQIFQKAYEHEQHISESINNIVDHAIKSKDHATFNFLQWYVAEQHEEEVLFKDILDKIELIGNENHGLYLADQYVKGIAKSRKSGS

SEQ ID NO: 472 - protein, 1395 aa, synthetic construct
YVDVGPDSVKSACIEVDIQQTFFDKTWPRPIDVSKADGIIYPQGRTYSNITITYQGLFPYQGDHGDMYVYSAGHATGTTPQKLFVANYSQDVKQFANGFVVRIGAAANSTGTVIISPSTSATIRKIYPAFMLGSSVGNFSDGKMGRFFNHTLVLLPDGCGTLLRAFYCILEPRSGNHCPAGNSYTSFATYHTPATDCSDGNYNRNASLNSFKEYFNLRNCTFMYTYNITEDEILEWFGITQTAQGVHLFSSRYVDLYGGNMFQFATLPVYDTIKYYSIIPHSIRSIQSDRKAWAAFYVYKLQPLTFLLDFSVDGYIRRAIDCGFNDLSQLHCSYESFDVESGVYSVSSFEAKPSGSVVEQAEGVECDFSPLLSGTPPQVYNFKRLVFTNCNYNLTKLLSLFSVNDFTCSQISPAAIASNCYSSLILDYFSYPLSMKSDLSVSSAGPISQFNYKQSFSNPTCLILATVPHNLTTITKPLKYSYINKCSRFLSDDRTEVPQLVNANQYSPCVSIVPSTVWEDGDYYRKQLSPLEGGGWLVASGSTVAMTEQLQMGFGITVQYGTDTNSVCPKLEFANDTKIASQLGNCVEYSLYGVSGRGVFQNCTAVGVRQQRFVYDAYQNLVGYYSDDGNYYCLRACVSVPVSVIYDKETKTHATLFGSVACEHISSTMSQYSRSTRSMLKRRDSTYGPLQTPVGCVLGLVNSSLFVEDCKLPLGQSLCALPDTPSTLTPASVGSVPGEMRLASIAFNHPIQVDQLNSSYFKLSIPTNFSFGVTQEYIQTTIQKVTVDCKQYVCNGFQKCEQLLREYGQFCSKINQALHGANLRQDDSVRNLFASVKSSQSSPIIPGFGGDFNLTLLEPVSISTGSRSARSAIEDLLFDKVTIADPGYMQGYDDCMQQGPASARDLICAQYVAGYKVLPPLMDVNMEAAYTSSLLGSIAGVGWTAGLSSFAAIPFAQSIFYRLNGVGITQQVLSENQKLIANKFNQALGAMQTGFTTTNEAFHKVQDAVNNNAQALSKLASELSNTFGAISASIGDIIQRLDPPEQDAQIDRLINGRLTTLNAFVAQQLVRSESAALSAQLAKDKVNECVKAQSKRSGFCGQGTHIVSFVVNAPNGLYFMHVGYYPSNHIEVVSAYGLCDAANPTNCIAPVNGYFIKTNNTRIVDEWSYTGSSFYAPEPITSLNTKYVAPQVTYQNISTNLPPPLLGNSELQDLQDELDELHKQGSGGSGDIIKLLNEQVNKEMQSSNLYMSMSSWCYTHSLDGAGLFLFDHAAEEYEHAKKLIIFLNENNVPVQLTSISAPEHKFEGLTQIFQKAYEHEQHISESINNIVDHAIKSKDHATFNFLQWYVAEQHEEEVLFKDILDKIELIGNENHGLYLADQYVKGIAKSRKSGS

SEQ ID NO: 473 - protein, 1395 aa, synthetic construct
YVDVGPDSVKSACIEVDIQQTFFDKTWPRPIDVSKADGIIYPQGRTYSNITITYQGLFPYQGDHGDMYVYSAGHATGTTPQKLFVANYSQDVKQFANGFVVRIGAAANSTGTVIISPSTSATIRKIYPAFMLGSSVGNFSDGKMGRFFNHTLVLLPDGCGTLLRAFYCILEPRSGNHCPAGNSYTSFATYHTPATDCSDGNYNRNASLNSFKEYFNLRNCTFMYTYNITEDEILEWFGITQTAQGVHLFSSRYVDLYGGNMFQFATLPVYDTIKYYSIIPHSIRSIQSDRKAWAAFYVYKLQPLTFLLDFSVDGYIRRAIDCGFNDLSQLHCSYESFDVESGVYSVSSFEAKPSGSVVEQAEGVECDFSPLLSGTPPQVYNFKRLVFTNCNYNLTKLLSLFSVNDFTCSQISPAAIASNCYSSLILDYFSYPLSMKSDLSVSSAGPISQFNYKQSFSNPTCLILATVPHNLTTITKPLKYSYINKCSRFLSDDRTEVPQLVNANQYSPCVSIVPSTVWEDGDYYRKQLSPLEGGGWLVASGSTVAMTEQLQMGFGITVQYGTDTNSVCPKLEFANDTKIASQLGNCVEYSLYGVSGRGVFQNCTAVGVRQQRFVYDAYQNLVGYYSDDGNYYCLRACVSVPVSVIYDKETKTHATLFGSVACEHISSTMSQYSRSTRSMLKRRDSTYGPLQTPVGCVLGLVNSSLFVEDCKLPLGQSLCALPDTPSTLTPASVGSVPGEMRLASIAFNHPIQVDQLNSSYFKLSIPTNFSFGVTQEYIQTTIQKVTVDCKQYVCNGFQKCEQLLREYGQFCSKINQALHGANLRQDDSVRNLFASVKSSQSSPIIPGFGGDFNLTLLEPVSISTGSRSARSAIEDLLFDKVTIADPGYMQGYDDCMQQGPASARDLICAQYVAGYKVLPPLMDVNMEAAYTSSLLGSIAGVGWTAGLSSFAAIPFAQSIFYRLNGVGITQQVLSENQKLIANKFNQALGAMQTGFTTTNEAFHKVQDAVNNNAQALSKLASELSNTFGAISASIGDIIQRLDPPEQDAQIDRLINGRLTTLNAFVAQQLVRSESAALSAQLAKDKVNECVKAQSKRSGFCGQGTHIVSFVVNAPNGLYFMHVGYYPSNHIEVVSAYGLCDAANPTNCIAPVNGYFIKTNNTRIVDEWSYTGSSFYAPEPITSLNTKYVAPQVTYQNISTNLPPPLLGNSELQDLQDELDELHKNGSGGSGDIIKLLNEQVNKEMQSSNLYMSMSSWCYTHSLDGAGLFLFDHAAEEYEHAKKLIIFLNENNVPVQLTSISAPEHKFEGLTQIFQKAYEHEQHISESINNIVDHAIKSKDHATFNFLQWYVAEQHEEEVLFKDILDKIELIGNENHGLYLADQYVKGIAKSRKSGS

SEQ ID NO: 474 - protein, 1395 aa, synthetic construct
YVDVGPDSVKSACIEVDIQQTFFDKTWPRPIDVSKADGIIYPQGRTYSNITITYQGLFPYQGDHGDMYVYSAGHATGTTPQKLFVANYSQDVKQFANGFVVRIGAAANSTGTVIISPSTSATIRKIYPAFMLGSSVGNFSDGKMGRFFNHTLVLLPDGCGTLLRAFYCILEPRSGNHCPAGNSYTSFATYHTPATDCSDGNYNRNASLNSFKEYFNLRNCTFMYTYNITEDEILEWFGITQTAQGVHLFSSRYVDLYGGNMFQFATLPVYDTIKYYSIIPHSIRSIQSDRKAWAAFYVYKLQPLTFLLDFSVDGYIRRAIDCGFNDLSQLHCSYESFDVESGVYSVSSFEAKPSGSVVEQAEGVECDFSPLLSGTPPQVYNFKRLVFTNCNYNLTKLLSLFSVNDFTCSQISPAAIASNCYSSLILDYFSYPLSMKSDLSVSSAGPISQFNYKQSFSNPTCLILATVPHNLTTITKPLKYSYINKCSRFLSDDRTEVPQLVNANQYSPCVSIVPSTVWEDGDYYRKQLSPLEGGGWLVASGSTVAMTEQLQMGFGITVQYGTDTNSVCPKLEFANDTKIASQLGNCVEYSLYGVSGRGVFQNCTAVGVRQQRFVYDAYQNLVGYYSDDGNYYCLRACVSVPVSVIYDKETKTHATLFGSVACEHISSTMSQYSRSTRSMLKRRDSTYGPLQTPVGCVLGLVNSSLFVEDCKLPLGQSLCALPDTPSTLTPASVGSVPGEMRLASIAFNHPIQVDQLNSSYFKLSIPTNFSFGVTQEYIQTTIQKVTVDCKQYVCNGFQKCEQLLREYGQFCSKINQALHGANLRQDDSVRNLFASVKSSQSSPIIPGFGGDFNLTLLEPVSISTGSRSARSAIEDLLFDKVTIADPGYMQGYDDCMQQGPASARDLICAQYVAGYKVLPPLMDVNMEAAYTSSLLGSIAGVGWTAGLSSFAAIPFAQSIFYRLNGVGITQQVLSENQKLIANKFNQALGAMQTGFTTTNEAFHKVQDAVNNNAQALSKLASELSNTFGAISASIGDIIQRLDPPEQDAQIDRLINGRLTTLNAFVAQQLVRSESAALSAQLAKDKVNECVKAQSKRSGFCGQGTHIVSFVVNAPNGLYFMHVGYYPSNHIEVVSAYGLCDAANPTNCIAPVNGYFIKTNNTRIVDEWSYTGSSFYAPEPITSLNTKYVAPQVTYQNISTNLPPPLLGNSTLQDIQDELDEIHKQGSGGSGDIIKLLNEQVNKEMQSSNLYMSMSSWCYTHSLDGAGLFLFDHAAEEYEHAKKLIIFLNENNVPVQLTSISAPEHKFEGLTQIFQKAYEHEQHISESINNIVDHAIKSKDHATFNFLQWYVAEQHEEEVLFKDILDKIELIGNENHGLYLADQYVKGIAKSRKSGS

SEQ ID NO: 475 - protein, 1395 aa, synthetic construct
YVDVGPDSVKSACIEVDIQQTFFDKTWPRPIDVSKADGIIYPQGRTYSNITITYQGLFPYQGDHGDMYVYSAGHATGTTPQKLFVANYSQDVKQFANGFVVRIGAAANSTGTVIISPSTSATIRKIYPAFMLGSSVGNFSDGKMGRFFNHTLVLLPDGCGTLLRAFYCILEPRSGNHCPAGNSYTSFATYHTPATDCSDGNYNRNASLNSFKEYFNLRNCTFMYTYNITEDEILEWFGITQTAQGVHLFSSRYVDLYGGNMFQFATLPVYDTIKYYSIIPHSIRSIQSDRKAWAAFYVYKLQPLTFLLDFSVDGYIRRAIDCGFNDLSQLHCSYESFDVESGVYSVSSFEAKPSGSVVEQAEGVECDFSPLLSGTPPQVYNFKRLVFTNCNYNLTKLLSLFSVNDFTCSQISPAAIASNCYSSLILDYFSYPLSMKSDLSVSSAGPISQFNYKQSFSNPTCLILATVPHNLTTITKPLKYSYINKCSRFLSDDRTEVPQLVNANQYSPCVSIVPSTVWEDGDYYRKQLSPLEGGGWLVASGSTVAMTEQLQMGFGITVQYGTDTNSVCPKLEFANDTKIASQLGNCVEYSLYGVSGRGVFQNCTAVGVRQQRFVYDAYQNLVGYYSDDGNYYCLRACVSVPVSVIYDKETKTHATLFGSVACEHISSTMSQYSRSTRSMLKRRDSTYGPLQTPVGCVLGLVNSSLFVEDCKLPLGQSLCALPDTPSTLTPASVGSVPGEMRLASIAFNHPIQVDQLNSSYFKLSIPTNFSFGVTQEYIQTTIQKVTVDCKQYVCNGFQKCEQLLREYGQFCSKINQALHGANLRQDDSVRNLFASVKSSQSSPIIPGFGGDFNLTLLEPVSISTGSRSARSAIEDLLFDKVTIADPGYMQGYDDCMQQGPASARDLICAQYVAGYKVLPPLMDVNMEAAYTSSLLGSIAGVGWTAGLSSFAAIPFAQSIFYRLNGVGITQQVLSENQKLIANKFNQALGAMQTGFTTTNEAFHKVQDAVNNNAQALSKLASELSNTFGAISASIGDIIQRLDPPEQDAQIDRLINGRLTTLNAFVAQQLVRSESAALSAQLAKDKVNECVKAQSKRSGFCGQGTHIVSFVVNAPNGLYFMHVGYYPSNHIEVVSAYGLCDAANPTNCIAPVNGYFIKTNNTRIVDEWSYTGSSFYAPEPITSLNTKYVAPQVTYQNISTNLPPPLLGNSTLQDLQDELDELHKQGSGGSGDIIKLLNEQVNKEMQSSNLYMSMSSWCYTHSLDGAGLFLFDHAAEEYEHAKKLIIFLNENNVPVQLTSISAPEHKFEGLTQIFQKAYEHEQHISESINNIVDHAIKSKDHATFNFLQWYVAEQHEEEVLFKDILDKIELIGNENHGLYLADQYVKGIAKSRKSGS

SEQ ID NO: 476 - protein, 409 aa, synthetic construct
MDSKGSSQKGSRLLLLLVVSNLLLPQGVVGQNITNLCPFGEVFNATRFASVYAWNRKRISNCVADYSVLYNSASFSTFKCYGVSPTKLNDLCFTNVYADSFVIRGDEVRQIAPGQTGNIADYNYKLPDDFTGCVIAWNSNNLDSKVGGNYNYLRRLFRKSNLKPFERDISTEIYQAGSTPCNGVKGFNCYFPLQSYGFQPTYGVGYQPYRVVVLSFENKSAPATVCGGGSGGSGESQVRQQFSKDIEKLLNEQVNKEMQSSNLYMSMSSWCYTHSLDGAGLFLFDHAAEEYEHAKKLIIFLNENNVPVQLTSISAPEHKFEGLTQIFQKAYEHEQHISESINNIVDHAIKSKDHATFNFLQWYVAEQHEEEVLFKDILDKIELIGNENHGLYLADQYVKGIAKSRKSGS

SEQ ID NO: 477 - protein, 409 aa, synthetic construct
MDSKGSSQKGSRLLLLLVVSNLLLPQGVVGQNITNLCPFDEVFNATRFASVYAWNRKRISNCVADYSVLYNFAPFFAFKCYGVSPTKLNDLCFTNVYADSFVIRGNEVSQIAPGQTGNIADYNYKLPDDFTGCVIAWNSNKLDSKVGGNYNYRRRLFRKSNLKPFERDISTEIYQAGNKPCNGVAGVNCYFPLQSYGFRPTYGVGHQPYRVVVLSFENKSAPATVCGGGSGGSGESQVRQQFSKDIEKLLNEQVNKEMQSSNLYMSMSSWCYTHSLDGAGLFLFDHAAEEYEHAKKLIIFLNENNVPVQLTSISAPEHKFEGLTQIFQKAYEHEQHISESINNIVDHAIKSKDHATFNFLQWYVAEQHEEEVLFKDILDKIELIGNENHGLYLADQYVKGIAKSRKSGS

SEQ ID NO: 478 - protein, 406 aa, synthetic construct
MDSKGSSQKGSRLLLLLVVSNLLLPQGVVGQNMTNICPFDQVFNKTQFPSVYAWERVRISDCVSDYTVLYNSSASFSTFKCYGVSPTKLNDLCFSGVYADYFVVKGDHVHQIAPGQTGVIADYNYKLPSEFVGCILAWNTRTIDSKRGFYYRLFRHGNIRPYERDTSNVPYNAAGGTCNQPGTHNCYEPLQDYGFTSTSGVGYQPFRVVVLSFENKSAPATVCGGGSGGSGESQVRQQFSKDIEKLLNEQVNKEMQSSNLYMSMSSWCYTHSLDGAGLFLFDHAAEEYEHAKKLIIFLNENNVPVQLTSISAPEHKFEGLTQIFQKAYEHEQHISESINNIVDHAIKSKDHATFNFLQWYVAEQHEEEVLFKDILDKIELIGNENHGLYLADQYVKGIAKSRKSGS

SEQ ID NO: 479 - protein, 390 aa, synthetic construct
MDSKGSSQKGSRLLLLLVVSNLLLPQGVVGQNITNFCPFDKVFNATRFPNVYAWQRTKISDCIADYTVLYNSTSFSTFKCYGVSPSKLIDLCFTSVYADTFLIRFSEVRQIAPGETGVIADYNYKLPDDFTGCVLAWNTAQQDIGSYFYRSHRAVKLKPFERDLSSDENGVRTLSTYDFNPNVPLDYQATRVVVLSFENKSAPATVCGGGSGGSGESQVRQQFSKDIEKLLNEQVNKEMQSSNLYMSMSSWCYTHSLDGAGLFLFDHAAEEYEHAKKLIIFLNENNVPVQLTSISAPEHKFEGLTQIFQKAYEHEQHISESINNIVDHAIKSKDHATFNFLQWYVAEQHEEEVLFKDILDKIELIGNENHGLYLADQYVKGIAKSRKSGS

SEQ ID NO: 480 - protein, 1344 aa, synthetic construct
MDSKGSSQKGSRLLLLLVVSNLLLPQGVVGQSSQCVNLITRTQSYTNSFTRGVYYPDKVFRSSVLHSTQDLFLPFFSNVTWFHAISGTNGTKRFDNPVLPFNDGVYFASTEKSNIIRGWIFGTTLDSKTQSLLIVNNATNVVIKVCEFQFCNDPFLDVYYHKNNKSWMESEFRVYSSANNCTFEYVSQPFLMDLEGKQGNFKNLREFVFKNIDGYFKIYSKHTPINLGRDLPQGFSALEPLVDLPIGINITRFQTLLALHRSYLTPGDSSSGWTAGAAAYYVGYLQPRTFLLKYNENGTITDAVDCALDPLSETKCTLKSFTVEKGIYQTSNFRVQPTESIVRFPNITNLCPFDEVFNATRFASVYAWNRKRISNCVADYSVLYNFAPFFAFKCYGVSPTKLNDLCFTNVYADSFVIRGNEVSQIAPGQTGNIADYNYKLPDDFTGCVIAWNSNKLDSKVGGNYNYRYRLFRKSNLKPFERDISTEIYQAGNKPCNGVAGVNCYFPLQSYGFRPTYGVGHQPYRVVVLSFELLHAPATVCGPKKSTNLVKNKCVNFNFNGLTGTGVLTESNKKFLPFQQFGRDIADTTDAVRDPQTLEILDITPCSFGGVSVITPGTNTSNQVAVLYQGVNCTEVPVAIHADQLTPTWRVYSTGSNVFQTRAGCLIGAEYVNNSYECDIPIGAGICASYQTQTKSHGSASSVASQSIIAYTMSLGAENSVAYSNNSIAIPTNFTISVTTEILPVSMTKTSVDCTMYICGDSTECSNLLLQYGSFCTQLKRALTGIAVEQDKNTQEVFAQVKQIYKTPPIKYFGGFNFSQILPDPSKPSKRSFIEDLLFNKVTLADAGFIKQYGDCLGDIAARDLICAQKFNGLTVLPPLLTDEMIAQYTSALLAGTITSGWTFGAGAALQIPFAMQMAYRFNGIGVTQNVLYENQKLIANQFNSAIGKIQDSLSSTASALGKLQDVVNHNAQALNTLVKQLSSKFGAISSVLNDILSRLDPPEAEVQIDRLITGRLQSLQTYVTQQLIRAAEIRASANLAATKMSECVLGQSKRVDFCGKGYHLMSFPQSAPHGVVFLHVTYVPAQEKNFTTAPAICHDGKAHFPREGVFVSNGTHWFVTQRNFYEPQIITTDNTFVSGNCDVVIGIVNNTVYDPLQSELDSIKEELDKIHKNGSGGSGDIIKLLNEQVNKEMQSSNLYMSMSSWCYTHSLDGAGLFLFDHAAEEYEHAKKLIIFLNENNVPVQLTSISAPEHKFEGLTQIFQKAYEHEQHISESINNIVDHAIKSKDHATFNFLQWYVAEQHEEEVLFKDILDKIELIGNENHGLYLADQYVKGIAKSRKSGS

SEQ ID NO: 481 - protein, 1327 aa, synthetic construct
MDSKGSSQKGSRLLLLLVVSNLLLPQGVVGQSSQDGCATLSTKLTPTQLQVNSTRRGFYYFDDIYRSSLRVLVPGYFLPFGTNITRYQAQVINWTAIFFDNPVIPFNDGVYFAALEHSNVVRGWIFGTTLDNTTQSAIVVNNATHILISVCYFNVCKEPMFAVSNFKPYKSWVYDRANNCTFNRAYPLNISTTPEPGKFKALREQVFRYQDGFLYIYHSYESINSDTLPPGFSVLKPMLKLPLGLNITRFRVVMAMHSLTTSNFNTHSVNYFVGHLKPLTMLVEFSPNGTIIDAIDCSQDPLSELKCTTKSFSVEKGIYQTSNFRVSPSLDVVRFPNMTNICPFDQVFNKTQFPSVYAWERVRISDCVSDYTVLYNSSASFSTFKCYGVSPTKLNDLCFSGVYADYFVVKGDHVHQIAPGQTGVIADYNYKLPSEFVGCILAWNTRTIDSKRGFYYRLFRHGNIRPYERDTSNVPYNAAGGTCNQPGTHNCYEPLQDYGFTSTSGVGYQPFRVVVLSFELLNAPATVCGPKQSTDLVKNKCVNFNFNGLTGTGVLTDSNKKFQPFQQFGRDSADFTDSVKDPKTLEILDITPCSYGGVSVITPGTNTSDSVAVLYQDVNCTDVPTMLHMDQVSNDWRVYAVNTDGNMFQTQAGCLVGATYDNTSYECDIPVGAGVCAKFQTTGSASQSSILAYTMSLGEDSNVAYSNNSIAIPTNFTISVTTEVLPVSMTKTAVDCNMYICGDSTECSSLLLQYGSFCQQLNRALAGVSVEQDKNTQDVFAQVKSIYKVSAIKDFGGFNFSQILPDPAKPSKRSFIEDLLYNKVTLADPGFMKQYGDCLGGVNARDLICAQKFNGLTVLPPLLTDDMIAAYTSALVSGTALSGFTFGAGAALQIPFAMQMAYRFNGIGVTQNVLYENQKQIANQFNKAISQIQESLTTTATALGKLQDVINQNAIALNTLVKQLSSNFGAISSVLNDILSRLDPPEAEVQIDRLITGRLQSLQTYVTQQLIRAADIRASANLAATKMSECVLGQSKRVDFCGKGYHLMSFPQAAPHGVVFLHVTYVPSQDKNFTTAPAICHKGKAYFPREGVFVTNGTHWFVTQRNFYQPEVITTENTFESGNCDVVIGIVNNTVYDPLQSELDSIKEELDKIHKNGSGGSGDIIKLLNEQVNKEMQSSNLYMSMSSWCYTHSLDGAGLFLFDHAAEEYEHAKKLIIFLNENNVPVQLTSISAPEHKFEGLTQIFQKAYEHEQHISESINNIVDHAIKSKDHATFNFLQWYVAEQHEEEVLFKDILDKIELIGNENHGLYLADQYVKGIAKSRKSGS

SEQ ID NO: 482 - protein, 1302 aa, synthetic construct
MDSKGSSQKGSRLLLLLVVSNLLLPQGVVGQTTCVTGPTTENKQNVSSLMRGVYYPDDIYRSNVNVLFTVPFLRFNSTLTWYNFWNQAYTSRVMEFGDGIYFSTVDKSNAVRGWIFGTTLDNTTQSALLINNGSLVTIQVCYFQFCANPAFLVAGGQQTSAAVYISSHNCTYSEVLSHISLDFTEDTGSFKRLREFVFKNNDGFLHIYGAYEPHVIGIGVTPSLPSTFKPLIPLWKLPLGLNITNFKVVLTFRSNSQPLQANFAVGSLKLTTFMLSFDINGTIDKAVDCSSDPLSELKCTLKSFNVSKGIYPTSNFRVLPSTEVVRFPNITNFCPFDKVFNATRFPNVYAWQRTKISDCIADYTVLYNSTSFSTFKCYGVSPSKLIDLCFTSVYADTFLIRFSEVRQIAPGETGVIADYNYKLPDDFTGCVLAWNTAQQDIGSYFYRSHRAVKLKPFERDLSSDENGVRTLSTYDFNPNVPLDYQATRVVVLSFELLNAPATVCGPKLSTQLVKNRCVNFNFNGLRGTGVLTDSDKRFQSFQQFGRDSADFTDSVRDPQTLQILDISPCSFGGVSVITPGTQTSSKVAVLYQDVNCTDVPTALGLDQISAAWRVYAIGNDVFQTQAGCLVGAEHTNISYECDIPIGAGVCASYNSGSASVGTNSIIAYAMSIGAESSIAYSNNSIAIPTNFSIQVTTEVLPVSMSKTSVDCTMYICGDSQECNKLLLQYGSFCAQLNRALSGVAVEQDKNTEAVFAQVKQIYKAPVIKDLGGFNFSQLLPDPTKPSQRSFIEDLLFDKVTLSDAGFIKQYGDCLGDIAARDLICAQKFNGLTVLPPLLTDEMIAAYTSALVSGTATAGWTFGIGAALQVPFAMQMAYRFNGIGVTQNVLYENQKLIANQFNSAIGKIQDSLLSTASALGKLQDVVNQNAQALNTLVKQLSSNFGAISSVLNDILSRLDPPEAEVQIDRLITGRLQSLQTYVTQQLIRAAEIRASANLAATKMSECVLGQSKRVDFCGKGYHLMSFPQSAPHGVVFLHVTYVPAQEKNFTTAPAICYDGKAHFPREGVFVSNGTHWFVTQRNFYEPQIITTDNTFVSGTCDVVIGIVNNTVYDPLQSELDSIKEELDKIHKNGSGGSGDIIKLLNEQVNKEMQSSNLYMSMSSWCYTHSLDGAGLFLFDHAAEEYEHAKKLIIFLNENNVPVQLTSISAPEHKFEGLTQIFQKAYEHEQHISESINNIVDHAIKSKDHATFNFLQWYVAEQHEEEVLFKDILDKIELIGNENHGLYLADQYVKGIAKSRKSGS

SEQ ID NO: 483 - protein, 612 aa, synthetic construct
MDSKGSSQKGSRLLLLLVVSNLLLPQGVVGQNITNLCPFGEVFNATRFASVYAWNRKRISNCVADYSVLYNSASFSTFKCYGVSPTKLNDLCFTNVYADSFVIRGDEVRQIAPGQTGNIADYNYKLPDDFTGCVIAWNSNNLDSKVGGNYNYLRRLFRKSNLKPFERDISTEIYQAGSTPCNGVKGFNCYFPLQSYGFQPTYGVGYQPYRVVVLSFENKSAPATVCGGGSGGSGNITNLCPFGEVFNATRFASVYAWNRKRISNCVADYSVLYNSASFSTFKCYGVSPTKLNDLCFTNVYADSFVIRGDEVRQIAPGQTGKIADYNYKLPDDFTGCVIAWNSNNLDSKVGGNYNYLRRLFRKSNLKPFERDISTEIYQAGSTPCNGVEGFNCYFPLQSYGFQPTNGVGYQPYRVVVLSFENKSAPATVCGGGSGGSGESQVRQQFSKDIEKLLNEQVNKEMQSSNLYMSMSSWCYTHSLDGAGLFLFDHAAEEYEHAKKLIIFLNENNVPVQLTSISAPEHKFEGLTQIFQKAYEHEQHISESINNIVDHAIKSKDHATFNFLQWYVAEQHEEEVLFKDILDKIELIGNENHGLYLADQYVKGIAKSRKSGS

SEQ ID NO: 484 - protein, 612 aa, synthetic construct
MDSKGSSQKGSRLLLLLVVSNLLLPQGVVGQNITNLCPFGEVFNATRFASVYAWNRKRISNCVADYSVLYNSASFSTFKCYGVSPTKLNDLCFTNVYADSFVIRGDEVRQIAPGQTGKIADYNYKLPDDFTGCVIAWNSNNLDSKVGGNYNYLRRLFRKSNLKPFERDISTEIYQAGSTPCNGVEGFNCYFPLQSYGFQPTNGVGYQPYRVVVLSFENKSAPATVCGGGSGGSGNITNLCPFGEVFNATRFASVYAWNRKRISNCVADYSVLYNSASFSTFKCYGVSPTKLNDLCFTNVYADSFVIRGDEVRQIAPGQTGNIADYNYKLPDDFTGCVIAWNSNNLDSKVGGNYNYLRRLFRKSNLKPFERDISTEIYQAGSTPCNGVKGFNCYFPLQSYGFQPTYGVGYQPYRVVVLSFENKSAPATVCGGGSGGSGESQVRQQFSKDIEKLLNEQVNKEMQSSNLYMSMSSWCYTHSLDGAGLFLFDHAAEEYEHAKKLIIFLNENNVPVQLTSISAPEHKFEGLTQIFQKAYEHEQHISESINNIVDHAIKSKDHATFNFLQWYVAEQHEEEVLFKDILDKIELIGNENHGLYLADQYVKGIAKSRKSGS

SEQ ID NO: 485 - protein, 612 aa, synthetic construct
MDSKGSSQKGSRLLLLLVVSNLLLPQGVVGQNITNLCPFDEVFNATRFASVYAWNRKRISNCVADYSVLYNFAPFFAFKCYGVSPTKLNDLCFTNVYADSFVIRGNEVSQIAPGQTGNIADYNYKLPDDFTGCVIAWNSNKLDSKVGGNYNYRRRLFRKSNLKPFERDISTEIYQAGNKPCNGVAGVNCYFPLQSYGFRPTYGVGHQPYRVVVLSFENKSAPATVCGGGSGGSGNITNLCPFGEVFNATRFASVYAWNRKRISNCVADYSVLYNSASFSTFKCYGVSPTKLNDLCFTNVYADSFVIRGDEVRQIAPGQTGKIADYNYKLPDDFTGCVIAWNSNNLDSKVGGNYNYLRRLFRKSNLKPFERDISTEIYQAGSTPCNGVEGFNCYFPLQSYGFQPTNGVGYQPYRVVVLSFENKSAPATVCGGGSGGSGESQVRQQFSKDIEKLLNEQVNKEMQSSNLYMSMSSWCYTHSLDGAGLFLFDHAAEEYEHAKKLIIFLNENNVPVQLTSISAPEHKFEGLTQIFQKAYEHEQHISESINNIVDHAIKSKDHATFNFLQWYVAEQHEEEVLFKDILDKIELIGNENHGLYLADQYVKGIAKSRKSGS

SEQ ID NO: 486 - protein, 612 aa, synthetic construct
MDSKGSSQKGSRLLLLLVVSNLLLPQGVVGQNITNLCPFGEVFNATRFASVYAWNRKRISNCVADYSVLYNSASFSTFKCYGVSPTKLNDLCFTNVYADSFVIRGDEVRQIAPGQTGKIADYNYKLPDDFTGCVIAWNSNNLDSKVGGNYNYLRRLFRKSNLKPFERDISTEIYQAGSTPCNGVEGFNCYFPLQSYGFQPTNGVGYQPYRVVVLSFENKSAPATVCGGGSGGSGNITNLCPFDEVFNATRFASVYAWNRKRISNCVADYSVLYNFAPFFAFKCYGVSPTKLNDLCFTNVYADSFVIRGNEVSQIAPGQTGNIADYNYKLPDDFTGCVIAWNSNKLDSKVGGNYNYRRRLFRKSNLKPFERDISTEIYQAGNKPCNGVAGVNCYFPLQSYGFRPTYGVGHQPYRVVVLSFENKSAPATVCGGGSGGSGESQVRQQFSKDIEKLLNEQVNKEMQSSNLYMSMSSWCYTHSLDGAGLFLFDHAAEEYEHAKKLIIFLNENNVPVQLTSISAPEHKFEGLTQIFQKAYEHEQHISESINNIVDHAIKSKDHATFNFLQWYVAEQHEEEVLFKDILDKIELIGNENHGLYLADQYVKGIAKSRKSGS

SEQ ID NO: 487 - protein, 609 aa, synthetic construct
MDSKGSSQKGSRLLLLLVVSNLLLPQGVVGQNMTNICPFDQVFNKTQFPSVYAWERVRISDCVSDYTVLYNSSASFSTFKCYGVSPTKLNDLCFSGVYADYFVVKGDHVHQIAPGQTGVIADYNYKLPSEFVGCILAWNTRTIDSKRGFYYRLFRHGNIRPYERDTSNVPYNAAGGTCNQPGTHNCYEPLQDYGFTSTSGVGYQPFRVVVLSFENKSAPATVCGGGSGGSGNITNLCPFGEVFNATRFASVYAWNRKRISNCVADYSVLYNSASFSTFKCYGVSPTKLNDLCFTNVYADSFVIRGDEVRQIAPGQTGKIADYNYKLPDDFTGCVIAWNSNNLDSKVGGNYNYLRRLFRKSNLKPFERDISTEIYQAGSTPCNGVEGFNCYFPLQSYGFQPTNGVGYQPYRVVVLSFENKSAPATVCGGGSGGSGESQVRQQFSKDIEKLLNEQVNKEMQSSNLYMSMSSWCYTHSLDGAGLFLFDHAAEEYEHAKKLIIFLNENNVPVQLTSISAPEHKFEGLTQIFQKAYEHEQHISESINNIVDHAIKSKDHATFNFLQWYVAEQHEEEVLFKDILDKIELIGNENHGLYLADQYVKGIAKSRKSGS

SEQ ID NO: 488 - protein, 609 aa, synthetic construct
MDSKGSSQKGSRLLLLLVVSNLLLPQGVVGQNITNLCPFGEVFNATRFASVYAWNRKRISNCVADYSVLYNSASFSTFKCYGVSPTKLNDLCFTNVYADSFVIRGDEVRQIAPGQTGKIADYNYKLPDDFTGCVIAWNSNNLDSKVGGNYNYLRRLFRKSNLKPFERDISTEIYQAGSTPCNGVEGFNCYFPLQSYGFQPTNGVGYQPYRVVVLSFENKSAPATVCGGGSGGSGNMTNICPFDQVFNKTQFPSVYAWERVRISDCVSDYTVLYNSSASFSTFKCYGVSPTKLNDLCFSGVYADYFVVKGDHVHQIAPGQTGVIADYNYKLPSEFVGCILAWNTRTIDSKRGFYYRLFRHGNIRPYERDTSNVPYNAAGGTCNQPGTHNCYEPLQDYGFTSTSGVGYQPFRVVVLSFENKSAPATVCGGGSGGSGESQVRQQFSKDIEKLLNEQVNKEMQSSNLYMSMSSWCYTHSLDGAGLFLFDHAAEEYEHAKKLIIFLNENNVPVQLTSISAPEHKFEGLTQIFQKAYEHEQHISESINNIVDHAIKSKDHATFNFLQWYVAEQHEEEVLFKDILDKIELIGNENHGLYLADQYVKGIAKSRKSGS

SEQ ID NO: 489 - protein, 593 aa, synthetic construct
MDSKGSSQKGSRLLLLLVVSNLLLPQGVVGQNITNFCPFDKVFNATRFPNVYAWQRTKISDCIADYTVLYNSTSFSTFKCYGVSPSKLIDLCFTSVYADTFLIRFSEVRQIAPGETGVIADYNYKLPDDFTGCVLAWNTAQQDIGSYFYRSHRAVKLKPFERDLSSDENGVRTLSTYDFNPNVPLDYQATRVVVLSFENKSAPATVCGGGSGGSGNITNLCPFGEVFNATRFASVYAWNRKRISNCVADYSVLYNSASFSTFKCYGVSPTKLNDLCFTNVYADSFVIRGDEVRQIAPGQTGKIADYNYKLPDDFTGCVIAWNSNNLDSKVGGNYNYLRRLFRKSNLKPFERDISTEIYQAGSTPCNGVEGFNCYFPLQSYGFQPTNGVGYQPYRVVVLSFENKSAPATVCGGGSGGSGESQVRQQFSKDIEKLLNEQVNKEMQSSNLYMSMSSWCYTHSLDGAGLFLFDHAAEEYEHAKKLIIFLNENNVPVQLTSISAPEHKFEGLTQIFQKAYEHEQHISESINNIVDHAIKSKDHATFNFLQWYVAEQHEEEVLFKDILDKIELIGNENHGLYLADQYVKGIAKSRKSGS

SEQ ID NO: 490 - protein, 593 aa, synthetic construct
MDSKGSSQKGSRLLLLLVVSNLLLPQGVVGQNITNLCPFGEVFNATRFASVYAWNRKRISNCVADYSVLYNSASFSTFKCYGVSPTKLNDLCFTNVYADSFVIRGDEVRQIAPGQTGKIADYNYKLPDDFTGCVIAWNSNNLDSKVGGNYNYLRRLFRKSNLKPFERDISTEIYQAGSTPCNGVEGFNCYFPLQSYGFQPTNGVGYQPYRVVVLSFENKSAPATVCGGGSGGSGNITNFCPFDKVFNATRFPNVYAWQRTKISDCIADYTVLYNSTSFSTFKCYGVSPSKLIDLCFTSVYADTFLIRFSEVRQIAPGETGVIADYNYKLPDDFTGCVLAWNTAQQDIGSYFYRSHRAVKLKPFERDLSSDENGVRTLSTYDFNPNVPLDYQATRVVVLSFENKSAPATVCGGGSGGSGESQVRQQFSKDIEKLLNEQVNKEMQSSNLYMSMSSWCYTHSLDGAGLFLFDHAAEEYEHAKKLIIFLNENNVPVQLTSISAPEHKFEGLTQIFQKAYEHEQHISESINNIVDHAIKSKDHATFNFLQWYVAEQHEEEVLFKDILDKIELIGNENHGLYLADQYVKGIAKSRKSGS

SEQ ID NO: 491 - protein, 1552 aa, synthetic construct
MDSKGSSQKGSRLLLLLVVSNLLLPQGVVGQNITNLCPFDEVFNATRFASVYAWNRKRISNCVADYSVLYNFAPFFAFKCYGVSPTKLNDLCFTNVYADSFVIRGNEVSQIAPGQTGNIADYNYKLPDDFTGCVIAWNSNKLDSKVGGNYNYRRRLFRKSNLKPFERDISTEIYQAGNKPCNGVAGVNCYFPLQSYGFRPTYGVGHQPYRVVVLSFENKSAPATVCGGGSGGSGSSQCVNLTTRTQLPPAYTNSFTRGVYYPDKVFRSSVLHSTQDLFLPFFSNVTWFHAIHVSGTNGTKRFDNPVLPFNDGVYFASTEKSNIIRGWIFGTTLDSKTQSLLIVNNATNVVIKVCEFQFCNDPFLGVYYHKNNKSWMESEFRVYSSANNCTFEYVSQPFLMDLEGKQGNFKNLREFVFKNIDGYFKIYSKHTPINLVRDLPQGFSALEPLVDLPIGINITRFQTLLALHRSYLTPGDSSSGWTAGAAAYYVGYLQPRTFLLKYNENGTITDAVDCALDPLSETKCTLKSFTVEKGIYQTSNFRVQPTESIVRFPNITNLCPFGEVFNATRFASVYAWNRKRISNCVADYSVLYNSASFSTFKCYGVSPTKLNDLCFTNVYADSFVIRGDEVRQIAPGQTGKIADYNYKLPDDFTGCVIAWNSNNLDSKVGGNYNYLYRLFRKSNLKPFERDISTEIYQAGSTPCNGVEGFNCYFPLQSYGFQPTNGVGYQPYRVVVLSFELLHAPATVCGPKKSTNLVKNKCVNFNFNGLTGTGVLTESNKKFLPFQQFGRDIADTTDAVRDPQTLEILDITPCSFGGVSVITPGTNTSNQVAVLYQDVNCTEVPVAIHADQLTPTWRVYSTGSNVFQTRAGCLIGAEHVNNSYECDIPIGAGICASYQTQTNSPGSASSVASQSIIAYTMSLGAENSVAYSNNSIAIPTNFTISVTTEILPVSMTKTSVDCTMYICGDSTECSNLLLQYGSFCTQLNRALTGIAVEQDKNTQEVFAQVKQIYKTPPIKDFGGFNFSQILPDPSKPSKRSFIEDLLFNKVTLADAGFIKQYGDCLGDIAARDLICAQKFNGLTVLPPLLTDEMIAQYTSALLAGTITSGWTFGAGAALQIPFAMQMAYRFNGIGVTQNVLYENQKLIANQFNSAIGKIQDSLSSTASALGKLQDVVNQNAQALNTLVKQLSSNFGAISSVLNDILSRLDPPEAEVQIDRLITGRLQSLQTYVTQQLIRAAEIRASANLAATKMSECVLGQSKRVDFCGKGYHLMSFPQSAPHGVVFLHVTYVPAQEKNFTTAPAICHDGKAHFPREGVFVSNGTHWFVTQRNFYEPQIITTDNTFVSGNCDVVIGIVNNTVYDPLQSELDSIKEELDKIHKNGSGGSGDIIKLLNEQVNKEMQSSNLYMSMSSWCYTHSLDGAGLFLFDHAAEEYEHAKKLIIFLNENNVPVQLTSISAPEHKFEGLTQIFQKAYEHEQHISESINNIVDHAIKSKDHATFNFLQWYVAEQHEEEVLFKDILDKIELIGNENHGLYLADQYVKGIAKSRKSGS

SEQ ID NO: 492 - protein, 1533 aa, synthetic construct
MDSKGSSQKGSRLLLLLVVSNLLLPQGVVGQNITNFCPFDKVFNATRFPNVYAWQRTKISDCIADYTVLYNSTSFSTFKCYGVSPSKLIDLCFTSVYADTFLIRFSEVRQIAPGETGVIADYNYKLPDDFTGCVLAWNTAQQDIGSYFYRSHRAVKLKPFERDLSSDENGVRTLSTYDFNPNVPLDYQATRVVVLSFENKSAPATVCGGGSGGSGSSQCVNLTTRTQLPPAYTNSFTRGVYYPDKVFRSSVLHSTQDLFLPFFSNVTWFHAIHVSGTNGTKRFDNPVLPFNDGVYFASTEKSNIIRGWIFGTTLDSKTQSLLIVNNATNVVIKVCEFQFCNDPFLGVYYHKNNKSWMESEFRVYSSANNCTFEYVSQPFLMDLEGKQGNFKNLREFVFKNIDGYFKIYSKHTPINLVRDLPQGFSALEPLVDLPIGINITRFQTLLALHRSYLTPGDSSSGWTAGAAAYYVGYLQPRTFLLKYNENGTITDAVDCALDPLSETKCTLKSFTVEKGIYQTSNFRVQPTESIVRFPNITNLCPFGEVFNATRFASVYAWNRKRISNCVADYSVLYNSASFSTFKCYGVSPTKLNDLCFTNVYADSFVIRGDEVRQIAPGQTGKIADYNYKLPDDFTGCVIAWNSNNLDSKVGGNYNYLYRLFRKSNLKPFERDISTEIYQAGSTPCNGVEGFNCYFPLQSYGFQPTNGVGYQPYRVVVLSFELLHAPATVCGPKKSTNLVKNKCVNFNFNGLTGTGVLTESNKKFLPFQQFGRDIADTTDAVRDPQTLEILDITPCSFGGVSVITPGTNTSNQVAVLYQDVNCTEVPVAIHADQLTPTWRVYSTGSNVFQTRAGCLIGAEHVNNSYECDIPIGAGICASYQTQTNSPGSASSVASQSIIAYTMSLGAENSVAYSNNSIAIPTNFTISVTTEILPVSMTKTSVDCTMYICGDSTECSNLLLQYGSFCTQLNRALTGIAVEQDKNTQEVFAQVKQIYKTPPIKDFGGFNFSQILPDPSKPSKRSFIEDLLFNKVTLADAGFIKQYGDCLGDIAARDLICAQKFNGLTVLPPLLTDEMIAQYTSALLAGTITSGWTFGAGAALQIPFAMQMAYRFNGIGVTQNVLYENQKLIANQFNSAIGKIQDSLSSTASALGKLQDVVNQNAQALNTLVKQLSSNFGAISSVLNDILSRLDPPEAEVQIDRLITGRLQSLQTYVTQQLIRAAEIRASANLAATKMSECVLGQSKRVDFCGKGYHLMSFPQSAPHGVVFLHVTYVPAQEKNFTTAPAICHDGKAHFPREGVFVSNGTHWFVTQRNFYEPQIITTDNTFVSGNCDVVIGIVNNTVYDPLQSELDSIKEELDKIHKNGSGGSGDIIKLLNEQVNKEMQSSNLYMSMSSWCYTHSLDGAGLFLFDHAAEEYEHAKKLIIFLNENNVPVQLTSISAPEHKFEGLTQIFQKAYEHEQHISESINNIVDHAIKSKDHATFNFLQWYVAEQHEEEVLFKDILDKIELIGNENHGLYLADQYVKGIAKSRKSGS

SEQ ID NO: 493 - protein, 1732 aa, synthetic construct
MDSKGSSQKGSRLLLLLVVSNLLLPQGVVGQNMTNICPFDQVFNKTQFPSVYAWERVRISDCVSDYTVLYNSSASFSTFKCYGVSPTKLNDLCFSGVYADYFVVKGDHVHQIAPGQTGVIADYNYKLPSEFVGCILAWNTRTIDSKRGFYYRLFRHGNIRPYERDTSNVPYNAAGGTCNQPGTHNCYEPLQDYGFTSTSGVGYQPFRVVVLSFENKSAPATVCGGGSGGSGNITNFCPFDKVFNATRFPNVYAWQRTKISDCIADYTVLYNSTSFSTFKCYGVSPSKLIDLCFTSVYADTFLIRFSEVRQIAPGETGVIADYNYKLPDDFTGCVLAWNTAQQDIGSYFYRSHRAVKLKPFERDLSSDENGVRTLSTYDFNPNVPLDYQATRVVVLSFENKSAPATVCGGGSGGSGSSQCVNLTTRTQLPPAYTNSFTRGVYYPDKVFRSSVLHSTQDLFLPFFSNVTWFHAIHVSGTNGTKRFDNPVLPFNDGVYFASTEKSNIIRGWIFGTTLDSKTQSLLIVNNATNVVIKVCEFQFCNDPFLGVYYHKNNKSWMESEFRVYSSANNCTFEYVSQPFLMDLEGKQGNFKNLREFVFKNIDGYFKIYSKHTPINLVRDLPQGFSALEPLVDLPIGINITRFQTLLALHRSYLTPGDSSSGWTAGAAAYYVGYLQPRTFLLKYNENGTITDAVDCALDPLSETKCTLKSFTVEKGIYQTSNFRVQPTESIVRFPNITNLCPFGEVFNATKFPSVYAWERKKISNCVADYSVLYNSTFFSTFKCYGVSATKLNDLCFSNVYADSFVVKGDDVRQIAPGQTGVIADYNYKLPDDFMGCVLAWNTRNIDATSTGNYNYKYRYLRHGKLRPFERDISNVPFSPDGKPCTPPALNCYWPLNDYGFYTTTGIGYQPYRVVVLSFELLNAPATVCGPKKSTNLVKNKCVNFNFNGLTGTGVLTESNKKFLPFQQFGRDIADTTDAVRDPQTLEILDITPCSFGGVSVITPGTNTSNQVAVLYQDVNCTEVPVAIHADQLTPTWRVYSTGSNVFQTRAGCLIGAEHVNNSYECDIPIGAGICASYQTQTNSPGSASSVASQSIIAYTMSLGAENSVAYSNNSIAIPTNFTISVTTEILPVSMTKTSVDCTMYICGDSTECSNLLLQYGSFCTQLNRALTGIAVEQDKNTQEVFAQVKQIYKTPPIKDFGGFNFSQILPDPSKPSKRSFIEDLLFNKVTLADAGFIKQYGDCLGDIAARDLICAQKFNGLTVLPPLLTDEMIAQYTSALLAGTITSGWTFGAGAALQIPFAMQMAYRFNGIGVTQNVLYENQKLIANQFNSAIGKIQDSLSSTASALGKLQDVVNQNAQALNTLVKQLSSNFGAISSVLNDILSRLDPPEAEVQIDRLITGRLQSLQTYVTQQLIRAAEIRASANLAATKMSECVLGQSKRVDFCGKGYHLMSFPQSAPHGVVFLHVTYVPAQEKNFTTAPAICHDGKAHFPREGVFVSNGTHWFVTQRNFYEPQIITTDNTFVSGNCDVVIGIVNNTVYDPLQSELDSIKEELDKIHKNGSGGSGDIIKLLNEQVNKEMQSSNLYMSMSSWCYTHSLDGAGLFLFDHAAEEYEHAKKLIIFLNENNVPVQLTSISAPEHKFEGLTQIFQKAYEHEQHISESINNIVDHAIKSKDHATFNFLQWYVAEQHEEEVLFKDILDKIELIGNENHGLYLADQYVKGIAKSRKSGS

SEQ ID NO: 494 - protein, 1732 aa, synthetic construct
MDSKGSSQKGSRLLLLLVVSNLLLPQGVVGQNITNFCPFDKVFNATRFPNVYAWQRTKISDCIADYTVLYNSTSFSTFKCYGVSPSKLIDLCFTSVYADTFLIRFSEVRQIAPGETGVIADYNYKLPDDFTGCVLAWNTAQQDIGSYFYRSHRAVKLKPFERDLSSDENGVRTLSTYDFNPNVPLDYQATRVVVLSFENKSAPATVCGGGSGGSGNMTNICPFDQVFNKTQFPSVYAWERVRISDCVSDYTVLYNSSASFSTFKCYGVSPTKLNDLCFSGVYADYFVVKGDHVHQIAPGQTGVIADYNYKLPSEFVGCILAWNTRTIDSKRGFYYRLFRHGNIRPYERDTSNVPYNAAGGTCNQPGTHNCYEPLQDYGFTSTSGVGYQPFRVVVLSFENKSAPATVCGGGSGGSGSSQCVNLTTRTQLPPAYTNSFTRGVYYPDKVFRSSVLHSTQDLFLPFFSNVTWFHAIHVSGTNGTKRFDNPVLPFNDGVYFASTEKSNIIRGWIFGTTLDSKTQSLLIVNNATNVVIKVCEFQFCNDPFLGVYYHKNNKSWMESEFRVYSSANNCTFEYVSQPFLMDLEGKQGNFKNLREFVFKNIDGYFKIYSKHTPINLVRDLPQGFSALEPLVDLPIGINITRFQTLLALHRSYLTPGDSSSGWTAGAAAYYVGYLQPRTFLLKYNENGTITDAVDCALDPLSETKCTLKSFTVEKGIYQTSNFRVQPTESIVRFPNITNLCPFGEVFNATKFPSVYAWERKKISNCVADYSVLYNSTFFSTFKCYGVSATKLNDLCFSNVYADSFVVKGDDVRQIAPGQTGVIADYNYKLPDDFMGCVLAWNTRNIDATSTGNYNYKYRYLRHGKLRPFERDISNVPFSPDGKPCTPPALNCYWPLNDYGFYTTTGIGYQPYRVVVLSFELLNAPATVCGPKKSTNLVKNKCVNFNFNGLTGTGVLTESNKKFLPFQQFGRDIADTTDAVRDPQTLEILDITPCSFGGVSVITPGTNTSNQVAVLYQDVNCTEVPVAIHADQLTPTWRVYSTGSNVFQTRAGCLIGAEHVNNSYECDIPIGAGICASYQTQTNSPGSASSVASQSIIAYTMSLGAENSVAYSNNSIAIPTNFTISVTTEILPVSMTKTSVDCTMYICGDSTECSNLLLQYGSFCTQLNRALTGIAVEQDKNTQEVFAQVKQIYKTPPIKDFGGFNFSQILPDPSKPSKRSFIEDLLFNKVTLADAGFIKQYGDCLGDIAARDLICAQKFNGLTVLPPLLTDEMIAQYTSALLAGTITSGWTFGAGAALQIPFAMQMAYRFNGIGVTQNVLYENQKLIANQFNSAIGKIQDSLSSTASALGKLQDVVNQNAQALNTLVKQLSSNFGAISSVLNDILSRLDPPEAEVQIDRLITGRLQSLQTYVTQQLIRAAEIRASANLAATKMSECVLGQSKRVDFCGKGYHLMSFPQSAPHGVVFLHVTYVPAQEKNFTTAPAICHDGKAHFPREGVFVSNGTHWFVTQRNFYEPQIITTDNTFVSGNCDVVIGIVNNTVYDPLQSELDSIKEELDKIHKNGSGGSGDIIKLLNEQVNKEMQSSNLYMSMSSWCYTHSLDGAGLFLFDHAAEEYEHAKKLIIFLNENNVPVQLTSISAPEHKFEGLTQIFQKAYEHEQHISESINNIVDHAIKSKDHATFNFLQWYVAEQHEEEVLFKDILDKIELIGNENHGLYLADQYVKGIAKSRKSGS

SEQ ID NO: 495 - protein, 1732 aa, synthetic construct
MDSKGSSQKGSRLLLLLVVSNLLLPQGVVGQNITNFCPFDKVFNATRFPNVYAWQRTKISDCIADYTVLYNSTSFSTFKCYGVSPSKLIDLCFTSVYADTFLIRFSEVRQIAPGETGVIADYNYKLPDDFTGCVLAWNTAQQDIGSYFYRSHRAVKLKPFERDLSSDENGVRTLSTYDFNPNVPLDYQATRVVVLSFENKSAPATVCGGGSGGSGNITNLCPFGEVFNATKFPSVYAWERKKISNCVADYSVLYNSTFFSTFKCYGVSATKLNDLCFSNVYADSFVVKGDDVRQIAPGQTGVIADYNYKLPDDFMGCVLAWNTRNIDATSTGNYNYKRRYLRHGKLRPFERDISNVPFSPDGKPCTPPALNCYWPLNDYGFYTTTGIGYQPYRVVVLSFENKSAPATVCGGGSGGSGSSQCVNLTTRTQLPPAYTNSFTRGVYYPDKVFRSSVLHSTQDLFLPFFSNVTWFHAIHVSGTNGTKRFDNPVLPFNDGVYFASTEKSNIIRGWIFGTTLDSKTQSLLIVNNATNVVIKVCEFQFCNDPFLGVYYHKNNKSWMESEFRVYSSANNCTFEYVSQPFLMDLEGKQGNFKNLREFVFKNIDGYFKIYSKHTPINLVRDLPQGFSALEPLVDLPIGINITRFQTLLALHRSYLTPGDSSSGWTAGAAAYYVGYLQPRTFLLKYNENGTITDAVDCALDPLSETKCTLKSFTVEKGIYQTSNFRVQPTESIVRFPNMTNICPFDQVFNKTQFPSVYAWERVRISDCVSDYTVLYNSSASFSTFKCYGVSPTKLNDLCFSGVYADYFVVKGDHVHQIAPGQTGVIADYNYKLPSEFVGCILAWNTRTIDSKRGFYYRLFRHGNIRPYERDTSNVPYNAAGGTCNQPGTHNCYEPLQDYGFTSTSGVGYQPFRVVVLSFELLNAPATVCGPKKSTNLVKNKCVNFNFNGLTGTGVLTESNKKFLPFQQFGRDIADTTDAVRDPQTLEILDITPCSFGGVSVITPGTNTSNQVAVLYQDVNCTEVPVAIHADQLTPTWRVYSTGSNVFQTRAGCLIGAEHVNNSYECDIPIGAGICASYQTQTNSPGSASSVASQSIIAYTMSLGAENSVAYSNNSIAIPTNFTISVTTEILPVSMTKTSVDCTMYICGDSTECSNLLLQYGSFCTQLNRALTGIAVEQDKNTQEVFAQVKQIYKTPPIKDFGGFNFSQILPDPSKPSKRSFIEDLLFNKVTLADAGFIKQYGDCLGDIAARDLICAQKFNGLTVLPPLLTDEMIAQYTSALLAGTITSGWTFGAGAALQIPFAMQMAYRFNGIGVTQNVLYENQKLIANQFNSAIGKIQDSLSSTASALGKLQDVVNQNAQALNTLVKQLSSNFGAISSVLNDILSRLDPPEAEVQIDRLITGRLQSLQTYVTQQLIRAAEIRASANLAATKMSECVLGQSKRVDFCGKGYHLMSFPQSAPHGVVFLHVTYVPAQEKNFTTAPAICHDGKAHFPREGVFVSNGTHWFVTQRNFYEPQIITTDNTFVSGNCDVVIGIVNNTVYDPLQSELDSIKEELDKIHKNGSGGSGDIIKLLNEQVNKEMQSSNLYMSMSSWCYTHSLDGAGLFLFDHAAEEYEHAKKLIIFLNENNVPVQLTSISAPEHKFEGLTQIFQKAYEHEQHISESINNIVDHAIKSKDHATFNFLQWYVAEQHEEEVLFKDILDKIELIGNENHGLYLADQYVKGIAKSRKSGS

SEQ ID NO: 496 - protein, 1732 aa, synthetic construct
MDSKGSSQKGSRLLLLLVVSNLLLPQGVVGQNITNLCPFGEVFNATKFPSVYAWERKKISNCVADYSVLYNSTFFSTFKCYGVSATKLNDLCFSNVYADSFVVKGDDVRQIAPGQTGVIADYNYKLPDDFMGCVLAWNTRNIDATSTGNYNYKRRYLRHGKLRPFERDISNVPFSPDGKPCTPPALNCYWPLNDYGFYTTTGIGYQPYRVVVLSFENKSAPATVCGGGSGGSGNITNFCPFDKVFNATRFPNVYAWQRTKISDCIADYTVLYNSTSFSTFKCYGVSPSKLIDLCFTSVYADTFLIRFSEVRQIAPGETGVIADYNYKLPDDFTGCVLAWNTAQQDIGSYFYRSHRAVKLKPFERDLSSDENGVRTLSTYDFNPNVPLDYQATRVVVLSFENKSAPATVCGGGSGGSGSSQCVNLTTRTQLPPAYTNSFTRGVYYPDKVFRSSVLHSTQDLFLPFFSNVTWFHAIHVSGTNGTKRFDNPVLPFNDGVYFASTEKSNIIRGWIFGTTLDSKTQSLLIVNNATNVVIKVCEFQFCNDPFLGVYYHKNNKSWMESEFRVYSSANNCTFEYVSQPFLMDLEGKQGNFKNLREFVFKNIDGYFKIYSKHTPINLVRDLPQGFSALEPLVDLPIGINITRFQTLLALHRSYLTPGDSSSGWTAGAAAYYVGYLQPRTFLLKYNENGTITDAVDCALDPLSETKCTLKSFTVEKGIYQTSNFRVQPTESIVRFPNMTNICPFDQVFNKTQFPSVYAWERVRISDCVSDYTVLYNSSASFSTFKCYGVSPTKLNDLCFSGVYADYFVVKGDHVHQIAPGQTGVIADYNYKLPSEFVGCILAWNTRTIDSKRGFYYRLFRHGNIRPYERDTSNVPYNAAGGTCNQPGTHNCYEPLQDYGFTSTSGVGYQPFRVVVLSFELLNAPATVCGPKKSTNLVKNKCVNFNFNGLTGTGVLTESNKKFLPFQQFGRDIADTTDAVRDPQTLEILDITPCSFGGVSVITPGTNTSNQVAVLYQDVNCTEVPVAIHADQLTPTWRVYSTGSNVFQTRAGCLIGAEHVNNSYECDIPIGAGICASYQTQTNSPGSASSVASQSIIAYTMSLGAENSVAYSNNSIAIPTNFTISVTTEILPVSMTKTSVDCTMYICGDSTECSNLLLQYGSFCTQLNRALTGIAVEQDKNTQEVFAQVKQIYKTPPIKDFGGFNFSQILPDPSKPSKRSFIEDLLFNKVTLADAGFIKQYGDCLGDIAARDLICAQKFNGLTVLPPLLTDEMIAQYTSALLAGTITSGWTFGAGAALQIPFAMQMAYRFNGIGVTQNVLYENQKLIANQFNSAIGKIQDSLSSTASALGKLQDVVNQNAQALNTLVKQLSSNFGAISSVLNDILSRLDPPEAEVQIDRLITGRLQSLQTYVTQQLIRAAEIRASANLAATKMSECVLGQSKRVDFCGKGYHLMSFPQSAPHGVVFLHVTYVPAQEKNFTTAPAICHDGKAHFPREGVFVSNGTHWFVTQRNFYEPQIITTDNTFVSGNCDVVIGIVNNTVYDPLQSELDSIKEELDKIHKNGSGGSGDIIKLLNEQVNKEMQSSNLYMSMSSWCYTHSLDGAGLFLFDHAAEEYEHAKKLIIFLNENNVPVQLTSISAPEHKFEGLTQIFQKAYEHEQHISESINNIVDHAIKSKDHATFNFLQWYVAEQHEEEVLFKDILDKIELIGNENHGLYLADQYVKGIAKSRKSGS

SEQ ID NO: 497 - protein, 1735 aa, synthetic construct
MDSKGSSQKGSRLLLLLVVSNLLLPQGVVGQNITNFCPFDKVFNATRFPNVYAWQRTKISDCIADYTVLYNSTSFSTFKCYGVSPSKLIDLCFTSVYADTFLIRFSEVRQIAPGETGVIADYNYKLPDDFTGCVLAWNTAQQDIGSYFYRSHRAVKLKPFERDLSSDENGVRTLSTYDFNPNVPLDYQATRVVVLSFELLNAPATVCGGGSGGSGNITNLCPFGEVFNATKFPSVYAWERKKISNCVADYSVLYNSTFFSTFKCYGVSATKLNDLCFSNVYADSFVVKGDDVRQIAPGQTGVIADYNYKLPDDFMGCVLAWNTRNIDATSTGNYNYKRRYLRHGKLRPFERDISNVPFSPDGKPCTPPALNCYWPLNDYGFYTTTGIGYQPYRVVVLSFENKSAPATVCGGGSGGSGSSQCVNLTTRTQLPPAYTNSFTRGVYYPDKVFRSSVLHSTQDLFLPFFSNVTWFHAIHVSGTNGTKRFDNPVLPFNDGVYFASTEKSNIIRGWIFGTTLDSKTQSLLIVNNATNVVIKVCEFQFCNDPFLGVYYHKNNKSWMESEFRVYSSANNCTFEYVSQPFLMDLEGKQGNFKNLREFVFKNIDGYFKIYSKHTPINLVRDLPQGFSALEPLVDLPIGINITRFQTLLALHRSYLTPGDSSSGWTAGAAAYYVGYLQPRTFLLKYNENGTITDAVDCALDPLSETKCTLKSFTVEKGIYQTSNFRVQPTESIVRFPNITNLCPFGEVFNATRFASVYAWNRKRISNCVADYSVLYNSASFSTFKCYGVSPTKLNDLCFTNVYADSFVIRGDEVRQIAPGQTGKIADYNYKLPDDFTGCVIAWNSNNLDSKVGGNYNYLYRLFRKSNLKPFERDISTEIYQAGSTPCNGVEGFNCYFPLQSYGFQPTNGVGYQPYRVVVLSFELLHAPATVCGPKKSTNLVKNKCVNFNFNGLTGTGVLTESNKKFLPFQQFGRDIADTTDAVRDPQTLEILDITPCSFGGVSVITPGTNTSNQVAVLYQDVNCTEVPVAIHADQLTPTWRVYSTGSNVFQTRAGCLIGAEHVNNSYECDIPIGAGICASYQTQTNSPGSASSVASQSIIAYTMSLGAENSVAYSNNSIAIPTNFTISVTTEILPVSMTKTSVDCTMYICGDSTECSNLLLQYGSFCTQLNRALTGIAVEQDKNTQEVFAQVKQIYKTPPIKDFGGFNFSQILPDPSKPSKRSFIEDLLFNKVTLADAGFIKQYGDCLGDIAARDLICAQKFNGLTVLPPLLTDEMIAQYTSALLAGTITSGWTFGAGAALQIPFAMQMAYRFNGIGVTQNVLYENQKLIANQFNSAIGKIQDSLSSTASALGKLQDVVNQNAQALNTLVKQLSSNFGAISSVLNDILSRLDPPEAEVQIDRLITGRLQSLQTYVTQQLIRAAEIRASANLAATKMSECVLGQSKRVDFCGKGYHLMSFPQSAPHGVVFLHVTYVPAQEKNFTTAPAICHDGKAHFPREGVFVSNGTHWFVTQRNFYEPQIITTDNTFVSGNCDVVIGIVNNTVYDPLQSELDSIKEELDKIHKNGSGGSGDIIKLLNEQVNKEMQSSNLYMSMSSWCYTHSLDGAGLFLFDHAAEEYEHAKKLIIFLNENNVPVQLTSISAPEHKFEGLTQIFQKAYEHEQHISESINNIVDHAIKSKDHATFNFLQWYVAEQHEEEVLFKDILDKIELIGNENHGLYLADQYVKGIAKSRKSGS

SEQ ID NO: 498 - protein, 1735 aa, synthetic construct
MDSKGSSQKGSRLLLLLVVSNLLLPQGVVGQNITNLCPFGEVFNATKFPSVYAWERKKISNCVADYSVLYNSTFFSTFKCYGVSATKLNDLCFSNVYADSFVVKGDDVRQIAPGQTGVIADYNYKLPDDFMGCVLAWNTRNIDATSTGNYNYKRRYLRHGKLRPFERDISNVPFSPDGKPCTPPALNCYWPLNDYGFYTTTGIGYQPYRVVVLSFENKSAPATVCGGGSGGSGNITNFCPFDKVFNATRFPNVYAWQRTKISDCIADYTVLYNSTSFSTFKCYGVSPSKLIDLCFTSVYADTFLIRFSEVRQIAPGETGVIADYNYKLPDDFTGCVLAWNTAQQDIGSYFYRSHRAVKLKPFERDLSSDENGVRTLSTYDFNPNVPLDYQATRVVVLSFELLNAPATVCGGGSGGSGSSQCVNLTTRTQLPPAYTNSFTRGVYYPDKVFRSSVLHSTQDLFLPFFSNVTWFHAIHVSGTNGTKRFDNPVLPFNDGVYFASTEKSNIIRGWIFGTTLDSKTQSLLIVNNATNVVIKVCEFQFCNDPFLGVYYHKNNKSWMESEFRVYSSANNCTFEYVSQPFLMDLEGKQGNFKNLREFVFKNIDGYFKIYSKHTPINLVRDLPQGFSALEPLVDLPIGINITRFQTLLALHRSYLTPGDSSSGWTAGAAAYYVGYLQPRTFLLKYNENGTITDAVDCALDPLSETKCTLKSFTVEKGIYQTSNFRVQPTESIVRFPNITNLCPFGEVFNATRFASVYAWNRKRISNCVADYSVLYNSASFSTFKCYGVSPTKLNDLCFTNVYADSFVIRGDEVRQIAPGQTGKIADYNYKLPDDFTGCVIAWNSNNLDSKVGGNYNYLYRLFRKSNLKPFERDISTEIYQAGSTPCNGVEGFNCYFPLQSYGFQPTNGVGYQPYRVVVLSFELLHAPATVCGPKKSTNLVKNKCVNFNFNGLTGTGVLTESNKKFLPFQQFGRDIADTTDAVRDPQTLEILDITPCSFGGVSVITPGTNTSNQVAVLYQDVNCTEVPVAIHADQLTPTWRVYSTGSNVFQTRAGCLIGAEHVNNSYECDIPIGAGICASYQTQTNSPGSASSVASQSIIAYTMSLGAENSVAYSNNSIAIPTNFTISVTTEILPVSMTKTSVDCTMYICGDSTECSNLLLQYGSFCTQLNRALTGIAVEQDKNTQEVFAQVKQIYKTPPIKDFGGFNFSQILPDPSKPSKRSFIEDLLFNKVTLADAGFIKQYGDCLGDIAARDLICAQKFNGLTVLPPLLTDEMIAQYTSALLAGTITSGWTFGAGAALQIPFAMQMAYRFNGIGVTQNVLYENQKLIANQFNSAIGKIQDSLSSTASALGKLQDVVNQNAQALNTLVKQLSSNFGAISSVLNDILSRLDPPEAEVQIDRLITGRLQSLQTYVTQQLIRAAEIRASANLAATKMSECVLGQSKRVDFCGKGYHLMSFPQSAPHGVVFLHVTYVPAQEKNFTTAPAICHDGKAHFPREGVFVSNGTHWFVTQRNFYEPQIITTDNTFVSGNCDVVIGIVNNTVYDPLQSELDSIKEELDKIHKNGSGGSGDIIKLLNEQVNKEMQSSNLYMSMSSWCYTHSLDGAGLFLFDHAAEEYEHAKKLIIFLNENNVPVQLTSISAPEHKFEGLTQIFQKAYEHEQHISESINNIVDHAIKSKDHATFNFLQWYVAEQHEEEVLFKDILDKIELIGNENHGLYLADQYVKGIAKSRKSGS

SEQ ID NO: 499 - protein, 1268 aa, synthetic construct
MDSKGSSQKGSRLLLLLVVSNLLLPQGVVGQQDGCATLSTKLTPTQLQVNSTRRGFYYFDDIYRSSLRVLVPGYFLPFGTNITRYQAQVINWTAIFFDNPVIPFNDGVYFAALEHSNVVRGWIFGTTLDNTTQSAIVVNNATHILISVCYFNVCKEPMFAVSNFKPYKSWVYDRANNCTFNRAYPLNISTTPEPGKFKALREQVFRYQDGFLYIYHSYESINSDTLPPGFSVLKPMLKLPLGLNITRFRVVMAMHSLTTSNFNTHSVNYFVGHLKPLTMLVEFSPNGTIIDAIDCSQDPLSELKCTTKSFSVEKGIYQTSNFRVSPSLDVVRFPNMTNICPFDQVFNKTQFPSVYAWERVRISDCVSDYTVLYNSSASFSTFKCYGVSPTKLNDLCFSGVYADYFVVKGDHVHQIAPGQTGVIADYNYKLPSEFVGCILAWNTRTIDSKRGFYYRLFRHGNIRPYERDTSNVPYNAAGGTCNQPGTHNCYEPLQDYGFTSTSGVGYQPFRVVVLSFELLNAPATVCGPKQSTDLVKNKCVNFNFNGLTGTGVLTDSNKKFQPFQQFGRDSADFTDSVKDPKTLEILDITPCSYGGVSVITPGTNTSDSVAVLYQDVNCTDVPTMLHMDQVSNDWRVYAVNTDGNMFQTQAGCLVGATYDNTSYECDIPVGAGVCAKFQTTTRAKQSSILAYTMSLGEDSNVAYSNNSIAIPTNFTISVTTEVLPVSMTKTAVDCNMYICGDSTECSSLLLQYGSFCQQLNRALAGVSVEQDKNTQDVFAQVKSIYKVSAIKDFGGFNFSQILPDPAKPSKRSFIEDLLYNKVTLADPGFMKQYGDCLGGVNARDLICAQKFNGLTVLPPLLTDDMIAAYTSALVSGTALSGFTFGAGAALQIPFAMQMAYRFNGIGVTQNVLYENQKQIANQFNKAISQIQESLTTTATALGKLQDVINQNAIALNTLVKQLSSNFGAISSVLNDILSRLDPPEAEVQIDRLITGRLQSLQTYVTQQLIRAADIRASANLAATKMSECVLGQSKRVDFCGKGYHLMSFPQAAPHGVVFLHVTYVPSQDKNFTTAPAICHKGKAYFPREGVFVTNGTHWFVTQRNFYQPEVITTENTFESGNCDVVIGIVNNTVYDPLQPELESFKEELDKYFKNHTSPDVDFDDISGINASVVDIKKEIEHLNEIAKSLNESLIDLQELGKYEQYIKWPWYVWLGFIAGLIAIIMATIMLCCMTSCCSCLKGLCSCGSCCKFDDDHSEPVLKGVKLHY

SEQ ID NO: 500 - protein, 1245 aa, synthetic construct
MDSKGSSQKGSRLLLLLVVSNLLLPQGVVGQTTCVTGPTTENKQNVSSLMRGVYYPDDIYRSNVNVLFTVPFLRFNSTLTWYNFWNQAYTSRVMEFGDGIYFSTVDKSNAVRGWIFGTTLDNTTQSALLINNGSLVTIQVCYFQFCANPAFLVAGGQQTSAAVYISSHNCTYSEVLSHISLDFTEDTGSFKRLREFVFKNNDGFLHIYGAYEPHVIGIGVTPSLPSTFKPLIPLWKLPLGLNITNFKVVLTFRSNSQPLQANFAVGSLKLTTFMLSFDINGTIDKAVDCSSDPLSELKCTLKSFNVSKGIYPTSNFRVLPSTEVVRFPNITNFCPFDKVFNATRFPNVYAWQRTKISDCIADYTVLYNSTSFSTFKCYGVSPSKLIDLCFTSVYADTFLIRFSEVRQIAPGETGVIADYNYKLPDDFTGCVLAWNTAQQDIGSYFYRSHRAVKLKPFERDLSSDENGVRTLSTYDFNPNVPLDYQATRVVVLSFELLNAPATVCGPKLSTQLVKNRCVNFNFNGLRGTGVLTDSDKRFQSFQQFGRDSADFTDSVRDPQTLQILDISPCSFGGVSVITPGTQTSSKVAVLYQDVNCTDVPTALGLDQISAAWRVYAIGNDVFQTQAGCLVGAEHTNISYECDIPIGAGVCASYNSPAARVGTNSIIAYAMSIGAESSIAYSNNSIAIPTNFSIQVTTEVLPVSMSKTSVDCTMYICGDSQECNKLLLQYGSFCAQLNRALSGVAVEQDKNTEAVFAQVKQIYKAPVIKDLGGFNFSQLLPDPTKPSQRSFIEDLLFDKVTLSDAGFIKQYGDCLGDIAARDLICAQKFNGLTVLPPLLTDEMIAAYTSALVSGTATAGWTFGIGAALQVPFAMQMAYRFNGIGVTQNVLYENQKLIANQFNSAIGKIQDSLLSTASALGKLQDVVNQNAQALNTLVKQLSSNFGAISSVLNDILSRLDPPEAEVQIDRLITGRLQSLQTYVTQQLIRAAEIRASANLAATKMSECVLGQSKRVDFCGKGYHLMSFPQSAPHGVVFLHVTYVPAQEKNFTTAPAICYDGKAHFPREGVFVSNGTHWFVTQRNFYEPQIITTDNTFVSGTCDVVIGIVNNTVYDPLQPELDSFKEELDKYFKNHTSPDVDLGDISGINASVVNIQKEIDRLNEVAKNLNESLIDLQELGKYEQYIKWPWYIWLGFIAGLIAIVMVTIMLCCMTSCCSCLKGCCSCGSCCKFDEDDSEPVLNGVKLHY

SEQ ID NO: 501 - protein, 1735 aa, synthetic construct
MDSKGSSQKGSRLLLLLVVSNLLLPQGVVGQNITNLCPFGEVFNATRFASVYAWNRKRISNCVADYSVLYNSASFSTFKCYGVSPTKLNDLCFTNVYADSFVIRGDEVRQIAPGQTGKIADYNYKLPDDFTGCVIAWNSNNLDSKVGGNYNYLRRLFRKSNLKPFERDISTEIYQAGSTPCNGVEGFNCYFPLQSYGFQPTNGVGYQPYRVVVLSFENKSAPATVCGGGSGGSGNITNFCPFDKVFNATRFPNVYAWQRTKISDCIADYTVLYNSTSFSTFKCYGVSPSKLIDLCFTSVYADTFLIRFSEVRQIAPGETGVIADYNYKLPDDFTGCVLAWNTAQQDIGSYFYRSHRAVKLKPFERDLSSDENGVRTLSTYDFNPNVPLDYQATRVVVLSFENKSAPATVCGGGSGGSGSSQCVNLTTRTQLPPAYTNSFTRGVYYPDKVFRSSVLHSTQDLFLPFFSNVTWFHAIHVSGTNGTKRFDNPVLPFNDGVYFASTEKSNIIRGWIFGTTLDSKTQSLLIVNNATNVVIKVCEFQFCNDPFLGVYYHKNNKSWMESEFRVYSSANNCTFEYVSQPFLMDLEGKQGNFKNLREFVFKNIDGYFKIYSKHTPINLVRDLPQGFSALEPLVDLPIGINITRFQTLLALHRSYLTPGDSSSGWTAGAAAYYVGYLQPRTFLLKYNENGTITDAVDCALDPLSETKCTLKSFTVEKGIYQTSNFRVQPTESIVRFPNITNLCPFGEVFNATKFPSVYAWERKKISNCVADYSVLYNSTFFSTFKCYGVSATKLNDLCFSNVYADSFVVKGDDVRQIAPGQTGVIADYNYKLPDDFMGCVLAWNTRNIDATSTGNYNYKYRYLRHGKLRPFERDISNVPFSPDGKPCTPPALNCYWPLNDYGFYTTTGIGYQPYRVVVLSFELLNAPATVCGPKKSTNLVKNKCVNFNFNGLTGTGVLTESNKKFLPFQQFGRDIADTTDAVRDPQTLEILDITPCSFGGVSVITPGTNTSNQVAVLYQDVNCTEVPVAIHADQLTPTWRVYSTGSNVFQTRAGCLIGAEHVNNSYECDIPIGAGICASYQTQTNSPGSASSVASQSIIAYTMSLGAENSVAYSNNSIAIPTNFTISVTTEILPVSMTKTSVDCTMYICGDSTECSNLLLQYGSFCTQLNRALTGIAVEQDKNTQEVFAQVKQIYKTPPIKDFGGFNFSQILPDPSKPSKRSFIEDLLFNKVTLADAGFIKQYGDCLGDIAARDLICAQKFNGLTVLPPLLTDEMIAQYTSALLAGTITSGWTFGAGAALQIPFAMQMAYRFNGIGVTQNVLYENQKLIANQFNSAIGKIQDSLSSTASALGKLQDVVNQNAQALNTLVKQLSSNFGAISSVLNDILSRLDPPEAEVQIDRLITGRLQSLQTYVTQQLIRAAEIRASANLAATKMSECVLGQSKRVDFCGKGYHLMSFPQSAPHGVVFLHVTYVPAQEKNFTTAPAICHDGKAHFPREGVFVSNGTHWFVTQRNFYEPQIITTDNTFVSGNCDVVIGIVNNTVYDPLQSELDSIKEELDKIHKNGSGGSGDIIKLLNEQVNKEMQSSNLYMSMSSWCYTHSLDGAGLFLFDHAAEEYEHAKKLIIFLNENNVPVQLTSISAPEHKFEGLTQIFQKAYEHEQHISESINNIVDHAIKSKDHATFNFLQWYVAEQHEEEVLFKDILDKIELIGNENHGLYLADQYVKGIAKSRKSGS

SEQ ID NO: 502 - protein, 1735 aa, synthetic construct
MDSKGSSQKGSRLLLLLVVSNLLLPQGVVGQNITNLCPFGEVFNATRFASVYAWNRKRISNCVADYSVLYNSASFSTFKCYGVSPTKLNDLCFTNVYADSFVIRGDEVRQIAPGQTGKIADYNYKLPDDFTGCVIAWNSNNLDSKVGGNYNYLRRLFRKSNLKPFERDISTEIYQAGSTPCNGVEGFNCYFPLQSYGFQPTNGVGYQPYRVVVLSFENKSAPATVCGGGSGGSGNITNLCPFGEVFNATKFPSVYAWERKKISNCVADYSVLYNSTFFSTFKCYGVSATKLNDLCFSNVYADSFVVKGDDVRQIAPGQTGVIADYNYKLPDDFMGCVLAWNTRNIDATSTGNYNYKRRYLRHGKLRPFERDISNVPFSPDGKPCTPPALNCYWPLNDYGFYTTTGIGYQPYRVVVLSFENKSAPATVCGGGSGGSGSSQCVNLTTRTQLPPAYTNSFTRGVYYPDKVFRSSVLHSTQDLFLPFFSNVTWFHAIHVSGTNGTKRFDNPVLPFNDGVYFASTEKSNIIRGWIFGTTLDSKTQSLLIVNNATNVVIKVCEFQFCNDPFLGVYYHKNNKSWMESEFRVYSSANNCTFEYVSQPFLMDLEGKQGNFKNLREFVFKNIDGYFKIYSKHTPINLVRDLPQGFSALEPLVDLPIGINITRFQTLLALHRSYLTPGDSSSGWTAGAAAYYVGYLQPRTFLLKYNENGTITDAVDCALDPLSETKCTLKSFTVEKGIYQTSNFRVQPTESIVRFPNITNFCPFDKVFNATRFPNVYAWQRTKISDCIADYTVLYNSTSFSTFKCYGVSPSKLIDLCFTSVYADTFLIRFSEVRQIAPGETGVIADYNYKLPDDFTGCVLAWNTAQQDIGSYFYRSHRAVKLKPFERDLSSDENGVRTLSTYDFNPNVPLDYQATRVVVLSFELLNAPATVCGPKKSTNLVKNKCVNFNFNGLTGTGVLTESNKKFLPFQQFGRDIADTTDAVRDPQTLEILDITPCSFGGVSVITPGTNTSNQVAVLYQDVNCTEVPVAIHADQLTPTWRVYSTGSNVFQTRAGCLIGAEHVNNSYECDIPIGAGICASYQTQTNSPGSASSVASQSIIAYTMSLGAENSVAYSNNSIAIPTNFTISVTTEILPVSMTKTSVDCTMYICGDSTECSNLLLQYGSFCTQLNRALTGIAVEQDKNTQEVFAQVKQIYKTPPIKDFGGFNFSQILPDPSKPSKRSFIEDLLFNKVTLADAGFIKQYGDCLGDIAARDLICAQKFNGLTVLPPLLTDEMIAQYTSALLAGTITSGWTFGAGAALQIPFAMQMAYRFNGIGVTQNVLYENQKLIANQFNSAIGKIQDSLSSTASALGKLQDVVNQNAQALNTLVKQLSSNFGAISSVLNDILSRLDPPEAEVQIDRLITGRLQSLQTYVTQQLIRAAEIRASANLAATKMSECVLGQSKRVDFCGKGYHLMSFPQSAPHGVVFLHVTYVPAQEKNFTTAPAICHDGKAHFPREGVFVSNGTHWFVTQRNFYEPQIITTDNTFVSGNCDVVIGIVNNTVYDPLQSELDSIKEELDKIHKNGSGGSGDIIKLLNEQVNKEMQSSNLYMSMSSWCYTHSLDGAGLFLFDHAAEEYEHAKKLIIFLNENNVPVQLTSISAPEHKFEGLTQIFQKAYEHEQHISESINNIVDHAIKSKDHATFNFLQWYVAEQHEEEVLFKDILDKIELIGNENHGLYLADQYVKGIAKSRKSGS

SEQ ID NO: 503 - protein, 611 aa, synthetic construct
MDSKGSSQKGSRLLLLLVVSNLLLPQGVVGQNITNLCPFGEVFNATKFPSVYAWERKKISNCVADYSVLYNSTFFSTFKCYGVSATKLNDLCFSNVYADSFVVKGDDVRQIAPGQTGVIADYNYKLPDDFMGCVLAWNTRNIDATSTGNYNYKRRYLRHGKLRPFERDISNVPFSPDGKPCTPPALNCYWPLNDYGFYTTTGIGYQPYRVVVLSFENKSAPATVCGGGSGGSGNITNLCPFGEVFNATRFASVYAWNRKRISNCVADYSVLYNSASFSTFKCYGVSPTKLNDLCFTNVYADSFVIRGDEVRQIAPGQTGKIADYNYKLPDDFTGCVIAWNSNNLDSKVGGNYNYLRRLFRKSNLKPFERDISTEIYQAGSTPCNGVEGFNCYFPLQSYGFQPTNGVGYQPYRVVVLSFENKSAPATVCGGGSGGSGESQVRQQFSKDIEKLLNEQVNKEMQSSNLYMSMSSWCYTHSLDGAGLFLFDHAAEEYEHAKKLIIFLNENNVPVQLTSISAPEHKFEGLTQIFQKAYEHEQHISESINNIVDHAIKSKDHATFNFLQWYVAEQHEEEVLFKDILDKIELIGNENHGLYLADQYVKGIAKSRKSGS

SEQ ID NO: 504 - protein, 611 aa, synthetic construct
MDSKGSSQKGSRLLLLLVVSNLLLPQGVVGQNITNLCPFGEVFNATRFASVYAWNRKRISNCVADYSVLYNSASFSTFKCYGVSPTKLNDLCFTNVYADSFVIRGDEVRQIAPGQTGKIADYNYKLPDDFTGCVIAWNSNNLDSKVGGNYNYLRRLFRKSNLKPFERDISTEIYQAGSTPCNGVEGFNCYFPLQSYGFQPTNGVGYQPYRVVVLSFENKSAPATVCGGGSGGSGNITNLCPFGEVFNATKFPSVYAWERKKISNCVADYSVLYNSTFFSTFKCYGVSATKLNDLCFSNVYADSFVVKGDDVRQIAPGQTGVIADYNYKLPDDFMGCVLAWNTRNIDATSTGNYNYKRRYLRHGKLRPFERDISNVPFSPDGKPCTPPALNCYWPLNDYGFYTTTGIGYQPYRVVVLSFENKSAPATVCGGGSGGSGESQVRQQFSKDIEKLLNEQVNKEMQSSNLYMSMSSWCYTHSLDGAGLFLFDHAAEEYEHAKKLIIFLNENNVPVQLTSISAPEHKFEGLTQIFQKAYEHEQHISESINNIVDHAIKSKDHATFNFLQWYVAEQHEEEVLFKDILDKIELIGNENHGLYLADQYVKGIAKSRKSGS

SEQ ID NO: 505 - protein, 409 aa, synthetic construct
MDSKGSSQKGSRLLLLLVVSNLLLPQGVVGQNITNLCPFDEVFNATTFASVYAWNRKRISNCVADYSVLYNFAPFFAFKCYGVSPTKLNDLCFTNVYADSFVIRGNEVSQIAPGQTGNIADYNYKLPDDFTGCVIAWNSNKLDSTVGGNYNYRRRLFRKSKLKPFERDISTEIYQAGNKPCNGVAGVNCYFPLQSYGFRPTYGVGHQPYRVVVLSFENKSAPATVCGGGSGGSGESQVRQQFSKDIEKLLNEQVNKEMQSSNLYMSMSSWCYTHSLDGAGLFLFDHAAEEYEHAKKLIIFLNENNVPVQLTSISAPEHKFEGLTQIFQKAYEHEQHISESINNIVDHAIKSKDHATFNFLQWYVAEQHEEEVLFKDILDKIELIGNENHGLYLADQYVKGIAKSRKSGS

SEQ ID NO: 506 - protein, 1344 aa, synthetic construct
MDSKGSSQKGSRLLLLLVVSNLLLPQGVVGQSSQCVNLITRTQSYTNSFTRGVYYPDKVFRSSVLHSTQDLFLPFFSNVTWFHAISGTNGTKRFDNPVLPFNDGVYFASTEKSNIIRGWIFGTTLDSKTQSLLIVNNATNVVIKVCEFQFCNDPFLDVYYHKNNKSWMESEFRVYSSANNCTFEYVSQPFLMDLEGKQGNFKNLREFVFKNIDGYFKIYSKHTPINLGRDLPQGFSALEPLVDLPIGINITRFQTLLALHRSYLTPGDSSSGWTAGAAAYYVGYLQPRTFLLKYNENGTITDAVDCALDPLSETKCTLKSFTVEKGIYQTSNFRVQPTESIVRFPNITNLCPFDEVFNATTFASVYAWNRKRISNCVADYSVLYNFAPFFAFKCYGVSPTKLNDLCFTNVYADSFVIRGNEVSQIAPGQTGNIADYNYKLPDDFTGCVIAWNSNKLDSTVGGNYNYRYRLFRKSKLKPFERDISTEIYQAGNKPCNGVAGVNCYFPLQSYGFRPTYGVGHQPYRVVVLSFELLHAPATVCGPKKSTNLVKNKCVNFNFNGLTGTGVLTESNKKFLPFQQFGRDIADTTDAVRDPQTLEILDITPCSFGGVSVITPGTNTSNQVAVLYQGVNCTEVPVAIHADQLTPTWRVYSTGSNVFQTRAGCLIGAEYVNNSYECDIPIGAGICASYQTQTKSHGSASSVASQSIIAYTMSLGAENSVAYSNNSIAIPTNFTISVTTEILPVSMTKTSVDCTMYICGDSTECSNLLLQYGSFCTQLKRALTGIAVEQDKNTQEVFAQVKQIYKTPPIKYFGGFNFSQILPDPSKPSKRSFIEDLLFNKVTLADAGFIKQYGDCLGDIAARDLICAQKFNGLTVLPPLLTDEMIAQYTSALLAGTITSGWTFGAGAALQIPFAMQMAYRFNGIGVTQNVLYENQKLIANQFNSAIGKIQDSLSSTASALGKLQDVVNHNAQALNTLVKQLSSKFGAISSVLNDILSRLDPPEAEVQIDRLITGRLQSLQTYVTQQLIRAAEIRASANLAATKMSECVLGQSKRVDFCGKGYHLMSFPQSAPHGVVFLHVTYVPAQEKNFTTAPAICHDGKAHFPREGVFVSNGTHWFVTQRNFYEPQIITTDNTFVSGNCDVVIGIVNNTVYDPLQSELDSIKEELDKIHKNGSGGSGDIIKLLNEQVNKEMQSSNLYMSMSSWCYTHSLDGAGLFLFDHAAEEYEHAKKLIIFLNENNVPVQLTSISAPEHKFEGLTQIFQKAYEHEQHISESINNIVDHAIKSKDHATFNFLQWYVAEQHEEEVLFKDILDKIELIGNENHGLYLADQYVKGIAKSRKSGS

SEQ ID NO: 507 - protein, 612 aa, synthetic construct
MDSKGSSQKGSRLLLLLVVSNLLLPQGVVGQNITNLCPFDEVFNATTFASVYAWNRKRISNCVADYSVLYNFAPFFAFKCYGVSPTKLNDLCFTNVYADSFVIRGNEVSQIAPGQTGNIADYNYKLPDDFTGCVIAWNSNKLDSTVGGNYNYRRRLFRKSKLKPFERDISTEIYQAGNKPCNGVAGVNCYFPLQSYGFRPTYGVGHQPYRVVVLSFENKSAPATVCGGGSGGSGNITNLCPFGEVFNATRFASVYAWNRKRISNCVADYSVLYNSASFSTFKCYGVSPTKLNDLCFTNVYADSFVIRGDEVRQIAPGQTGKIADYNYKLPDDFTGCVIAWNSNNLDSKVGGNYNYLRRLFRKSNLKPFERDISTEIYQAGSTPCNGVEGFNCYFPLQSYGFQPTNGVGYQPYRVVVLSFENKSAPATVCGGGSGGSGESQVRQQFSKDIEKLLNEQVNKEMQSSNLYMSMSSWCYTHSLDGAGLFLFDHAAEEYEHAKKLIIFLNENNVPVQLTSISAPEHKFEGLTQIFQKAYEHEQHISESINNIVDHAIKSKDHATFNFLQWYVAEQHEEEVLFKDILDKIELIGNENHGLYLADQYVKGIAKSRKSGS

SEQ ID NO: 508 - protein, 612 aa, synthetic construct
MDSKGSSQKGSRLLLLLVVSNLLLPQGVVGQNITNLCPFGEVFNATRFASVYAWNRKRISNCVADYSVLYNSASFSTFKCYGVSPTKLNDLCFTNVYADSFVIRGDEVRQIAPGQTGKIADYNYKLPDDFTGCVIAWNSNNLDSKVGGNYNYLRRLFRKSNLKPFERDISTEIYQAGSTPCNGVEGFNCYFPLQSYGFQPTNGVGYQPYRVVVLSFENKSAPATVCGGGSGGSGNITNLCPFDEVFNATTFASVYAWNRKRISNCVADYSVLYNFAPFFAFKCYGVSPTKLNDLCFTNVYADSFVIRGNEVSQIAPGQTGNIADYNYKLPDDFTGCVIAWNSNKLDSTVGGNYNYRRRLFRKSKLKPFERDISTEIYQAGNKPCNGVAGVNCYFPLQSYGFRPTYGVGHQPYRVVVLSFENKSAPATVCGGGSGGSGESQVRQQFSKDIEKLLNEQVNKEMQSSNLYMSMSSWCYTHSLDGAGLFLFDHAAEEYEHAKKLIIFLNENNVPVQLTSISAPEHKFEGLTQIFQKAYEHEQHISESINNIVDHAIKSKDHATFNFLQWYVAEQHEEEVLFKDILDKIELIGNENHGLYLADQYVKGIAKSRKSGS

SEQ ID NO: 509 - protein, 1552 aa, synthetic construct
MDSKGSSQKGSRLLLLLVVSNLLLPQGVVGQNITNLCPFDEVFNATTFASVYAWNRKRISNCVADYSVLYNFAPFFAFKCYGVSPTKLNDLCFTNVYADSFVIRGNEVSQIAPGQTGNIADYNYKLPDDFTGCVIAWNSNKLDSTVGGNYNYRRRLFRKSKLKPFERDISTEIYQAGNKPCNGVAGVNCYFPLQSYGFRPTYGVGHQPYRVVVLSFENKSAPATVCGGGSGGSGSSQCVNLTTRTQLPPAYTNSFTRGVYYPDKVFRSSVLHSTQDLFLPFFSNVTWFHAIHVSGTNGTKRFDNPVLPFNDGVYFASTEKSNIIRGWIFGTTLDSKTQSLLIVNNATNVVIKVCEFQFCNDPFLGVYYHKNNKSWMESEFRVYSSANNCTFEYVSQPFLMDLEGKQGNFKNLREFVFKNIDGYFKIYSKHTPINLVRDLPQGFSALEPLVDLPIGINITRFQTLLALHRSYLTPGDSSSGWTAGAAAYYVGYLQPRTFLLKYNENGTITDAVDCALDPLSETKCTLKSFTVEKGIYQTSNFRVQPTESIVRFPNITNLCPFGEVFNATRFASVYAWNRKRISNCVADYSVLYNSASFSTFKCYGVSPTKLNDLCFTNVYADSFVIRGDEVRQIAPGQTGKIADYNYKLPDDFTGCVIAWNSNNLDSKVGGNYNYLYRLFRKSNLKPFERDISTEIYQAGSTPCNGVEGFNCYFPLQSYGFQPTNGVGYQPYRVVVLSFELLHAPATVCGPKKSTNLVKNKCVNFNFNGLTGTGVLTESNKKFLPFQQFGRDIADTTDAVRDPQTLEILDITPCSFGGVSVITPGTNTSNQVAVLYQDVNCTEVPVAIHADQLTPTWRVYSTGSNVFQTRAGCLIGAEHVNNSYECDIPIGAGICASYQTQTNSPGSASSVASQSIIAYTMSLGAENSVAYSNNSIAIPTNFTISVTTEILPVSMTKTSVDCTMYICGDSTECSNLLLQYGSFCTQLNRALTGIAVEQDKNTQEVFAQVKQIYKTPPIKDFGGFNFSQILPDPSKPSKRSFIEDLLFNKVTLADAGFIKQYGDCLGDIAARDLICAQKFNGLTVLPPLLTDEMIAQYTSALLAGTITSGWTFGAGAALQIPFAMQMAYRFNGIGVTQNVLYENQKLIANQFNSAIGKIQDSLSSTASALGKLQDVVNQNAQALNTLVKQLSSNFGAISSVLNDILSRLDPPEAEVQIDRLITGRLQSLQTYVTQQLIRAAEIRASANLAATKMSECVLGQSKRVDFCGKGYHLMSFPQSAPHGVVFLHVTYVPAQEKNFTTAPAICHDGKAHFPREGVFVSNGTHWFVTQRNFYEPQIITTDNTFVSGNCDVVIGIVNNTVYDPLQSELDSIKEELDKIHKNGSGGSGDIIKLLNEQVNKEMQSSNLYMSMSSWCYTHSLDGAGLFLFDHAAEEYEHAKKLIIFLNENNVPVQLTSISAPEHKFEGLTQIFQKAYEHEQHISESINNIVDHAIKSKDHATFNFLQWYVAEQHEEEVLFKDILDKIELIGNENHGLYLADQYVKGIAKSRKSGS

SEQ ID NO: 510 - protein, 1287 aa, synthetic construct
MDSKGSSQKGSRLLLLLVVSNLLLPQGVVGQSSQCVNLITRTQSYTNSFTRGVYYPDKVFRSSVLHSTQDLFLPFFSNVTWFHAISGTNGTKRFDNPVLPFNDGVYFASTEKSNIIRGWIFGTTLDSKTQSLLIVNNATNVVIKVCEFQFCNDPFLDVYYHKNNKSWMESEFRVYSSANNCTFEYVSQPFLMDLEGKQGNFKNLREFVFKNIDGYFKIYSKHTPINLGRDLPQGFSALEPLVDLPIGINITRFQTLLALHRSYLTPGDSSSGWTAGAAAYYVGYLQPRTFLLKYNENGTITDAVDCALDPLSETKCTLKSFTVEKGIYQTSNFRVQPTESIVRFPNITNLCPFDEVFNATTFASVYAWNRKRISNCVADYSVLYNFAPFFAFKCYGVSPTKLNDLCFTNVYADSFVIRGNEVSQIAPGQTGNIADYNYKLPDDFTGCVIAWNSNKLDSTVGGNYNYRYRLFRKSKLKPFERDISTEIYQAGNKPCNGVAGVNCYFPLQSYGFRPTYGVGHQPYRVVVLSFELLHAPATVCGPKKSTNLVKNKCVNFNFNGLTGTGVLTESNKKFLPFQQFGRDIADTTDAVRDPQTLEILDITPCSFGGVSVITPGTNTSNQVAVLYQGVNCTEVPVAIHADQLTPTWRVYSTGSNVFQTRAGCLIGAEYVNNSYECDIPIGAGICASYQTQTKSHGSASSVASQSIIAYTMSLGAENSVAYSNNSIAIPTNFTISVTTEILPVSMTKTSVDCTMYICGDSTECSNLLLQYGSFCTQLKRALTGIAVEQDKNTQEVFAQVKQIYKTPPIKYFGGFNFSQILPDPSKPSKRSFIEDLLFNKVTLADAGFIKQYGDCLGDIAARDLICAQKFNGLTVLPPLLTDEMIAQYTSALLAGTITSGWTFGAGAALQIPFAMQMAYRFNGIGVTQNVLYENQKLIANQFNSAIGKIQDSLSSTASALGKLQDVVNHNAQALNTLVKQLSSKFGAISSVLNDILSRLDPPEAEVQIDRLITGRLQSLQTYVTQQLIRAAEIRASANLAATKMSECVLGQSKRVDFCGKGYHLMSFPQSAPHGVVFLHVTYVPAQEKNFTTAPAICHDGKAHFPREGVFVSNGTHWFVTQRNFYEPQIITTDNTFVSGNCDVVIGIVNNTVYDPLQPELDSFKEELDKYFKNHTSPDVDLGDISGINASVVNIQKEIDRLNEVAKNLNESLIDLQELGKYEQYIKWPWYIWLGFIAGLIAIVMVTIMLCCMTSCCSCLKGCCSCGSCCKFDEDDSEPVLKGVKLHY

SEQ ID NO: 511 - protein, 1753 aa, synthetic construct
HHHHHHHHGPLEVLFQGPEGVECDFSPLLSGTPPQVYNFKRLVFTNCNYNLTKLLSLFSVNDFTCSQISPAAIASNCYSSLILDYFSYPLSMKSDLSVSSAGPISQFNYKQSFSNPTCLILATVPHNLTTITKPLKYSYINKCSRLLSDDRTEVPQLVNANQYSPCVSIVPSTVWEDGDYYRKQLSPLEGGGWLVASGSTVAMTEQLQMGFGITVQNGTDTNSVCPKGSGGSGNITNLCPFGEVFNATKFPSVYAWERKKISNCVADYSVLYNSTFFSTFKCYGVSATKLNDLCFSNVYADSFVVKGDDVRQIAPGQTGVIADYNYKLPDDFMGCVLAWNTRNIDATSTGNYNYKRRYLRHGKLRPFERDISNVPFSPDGKPCTPPALNCYWPLNDYGFYTTTGIGYQPYRVVVLSFENKSAPATVCGPGSGGSGSSQCVNLTTRTQLPPAYTNSFTRGVYYPDKVFRSSVLHSTQDLFLPFFSNVTWFHAIHVSGTNGTKRFDNPVLPFNDGVYFASTEKSNIIRGWIFGTTLDSKTQSLLIVNNATNVVIKVCEFQFCNDPFLGVYYHKNNKSWMESEFRVYSSANNCTFEYVSQPFLMDLEGKQGNFKNLREFVFKNIDGYFKIYSKHTPINLVRDLPQGFSALEPLVDLPIGINITRFQTLLALHRSYLTPGDSSSGWTAGAAAYYVGYLQPRTFLLKYNENGTITDAVDCALDPLSETKCTLKSFTVEKGIYQTSNFRVQPTESIVRFPNITNLCPFGEVFNATRFASVYAWNRKRISNCVADYSVLYNSASFSTFKCYGVSPTKLNDLCFTNVYADSFVIRGDEVRQIAPGQTGKIADYNYKLPDDFTGCVIAWNSNNLDSKVGGNYNYLYRLFRKSNLKPFERDISTEIYQAGSTPCNGVEGFNCYFPLQSYGFQPTNGVGYQPYRVVVLSFELLHAPATVCGPKKSTNLVKNKCVNFNFNGLTGTGVLTESNKKFLPFQQFGRDIADTTDAVRDPQTLEILDITPCSFGGVSVITPGTNTSNQVAVLYQDVNCTEVPVAIHADQLTPTWRVYSTGSNVFQTRAGCLIGAEHVNNSYECDIPIGAGICASYQTQTNSPGSASSVASQSIIAYTMSLGAENSVAYSNNSIAIPTNFTISVTTEILPVSMTKTSVDCTMYICGDSTECSNLLLQYGSFCTQLNRALTGIAVEQDKNTQEVFAQVKQIYKTPPIKDFGGFNFSQILPDPSKPSKRSFIEDLLFNKVTLADAGFIKQYGDCLGDIAARDLICAQKFNGLTVLPPLLTDEMIAQYTSALLAGTITSGWTFGAGAALQIPFAMQMAYRFNGIGVTQNVLYENQKLIANQFNSAIGKIQDSLSSTASALGKLQDVVNQNAQALNTLVKQLSSNFGAISSVLNDILSRLDPPEAEVQIDRLITGRLQSLQTYVTQQLIRAAEIRASANLAATKMSECVLGQSKRVDFCGKGYHLMSFPQSAPHGVVFLHVTYVPAQEKNFTTAPAICHDGKAHFPREGVFVSNGTHWFVTQRNFYEPQIITTDNTFVSGNCDVVIGIVNNTVYDPLQSELDSIKEELDKIHKNGSGGSGDIIKLLNEQVNKEMQSSNLYMSMSSWCYTHSLDGAGLFLFDHAAEEYEHAKKLIIFLNENNVPVQLTSISAPEHKFEGLTQIFQKAYEHEQHISESINNIVDHAIKSKDHATFNFLQWYVAEQHEEEVLFKDILDKIELIGNENHGLYLADQYVKGIAKSRKSGS

SEQ ID NO: 512 - protein, 1737 aa, synthetic construct
HHHHHHHHGPLEVLFQGPNITNLCPFSQVFNATRFPSVYAWTRERISNCIADYSVLYNSTSFSTFRCYGVSPTKLNDLCFSNVYADSMVVRGDEVRQIAPSQTGVIADYNYKLPDDFTGCVIAWNSKAKDENGQYFYRLFRKSKLLPFQRDVSNVTYGSGKNDGCNPSEADCYWPLLKYGFTSSVSQDYQPYRVVVLSFELLNAPATVCGPGSGGSGNITNLCPFGEVFNATKFPSVYAWERKKISNCVADYSVLYNSTFFSTFKCYGVSATKLNDLCFSNVYADSFVVKGDDVRQIAPGQTGVIADYNYKLPDDFMGCVLAWNTRNIDATSTGNYNYKRRYLRHGKLRPFERDISNVPFSPDGKPCTPPALNCYWPLNDYGFYTTTGIGYQPYRVVVLSFENKSAPATVCGPGSGGSGSSQCVNLTTRTQLPPAYTNSFTRGVYYPDKVFRSSVLHSTQDLFLPFFSNVTWFHAIHVSGTNGTKRFDNPVLPFNDGVYFASTEKSNIIRGWIFGTTLDSKTQSLLIVNNATNVVIKVCEFQFCNDPFLGVYYHKNNKSWMESEFRVYSSANNCTFEYVSQPFLMDLEGKQGNFKNLREFVFKNIDGYFKIYSKHTPINLVRDLPQGFSALEPLVDLPIGINITRFQTLLALHRSYLTPGDSSSGWTAGAAAYYVGYLQPRTFLLKYNENGTITDAVDCALDPLSETKCTLKSFTVEKGIYQTSNFRVQPTESIVRFPNITNLCPFGEVFNATRFASVYAWNRKRISNCVADYSVLYNSASFSTFKCYGVSPTKLNDLCFTNVYADSFVIRGDEVRQIAPGQTGKIADYNYKLPDDFTGCVIAWNSNNLDSKVGGNYNYLYRLFRKSNLKPFERDISTEIYQAGSTPCNGVEGFNCYFPLQSYGFQPTNGVGYQPYRVVVLSFELLHAPATVCGPKKSTNLVKNKCVNFNFNGLTGTGVLTESNKKFLPFQQFGRDIADTTDAVRDPQTLEILDITPCSFGGVSVITPGTNTSNQVAVLYQDVNCTEVPVAIHADQLTPTWRVYSTGSNVFQTRAGCLIGAEHVNNSYECDIPIGAGICASYQTQTNSPGSASSVASQSIIAYTMSLGAENSVAYSNNSIAIPTNFTISVTTEILPVSMTKTSVDCTMYICGDSTECSNLLLQYGSFCTQLNRALTGIAVEQDKNTQEVFAQVKQIYKTPPIKDFGGFNFSQILPDPSKPSKRSFIEDLLFNKVTLADAGFIKQYGDCLGDIAARDLICAQKFNGLTVLPPLLTDEMIAQYTSALLAGTITSGWTFGAGAALQIPFAMQMAYRFNGIGVTQNVLYENQKLIANQFNSAIGKIQDSLSSTASALGKLQDVVNQNAQALNTLVKQLSSNFGAISSVLNDILSRLDPPEAEVQIDRLITGRLQSLQTYVTQQLIRAAEIRASANLAATKMSECVLGQSKRVDFCGKGYHLMSFPQSAPHGVVFLHVTYVPAQEKNFTTAPAICHDGKAHFPREGVFVSNGTHWFVTQRNFYEPQIITTDNTFVSGNCDVVIGIVNNTVYDPLQSELDSIKEELDKIHKNGSGGSGDIIKLLNEQVNKEMQSSNLYMSMSSWCYTHSLDGAGLFLFDHAAEEYEHAKKLIIFLNENNVPVQLTSISAPEHKFEGLTQIFQKAYEHEQHISESINNIVDHAIKSKDHATFNFLQWYVAEQHEEEVLFKDILDKIELIGNENHGLYLADQYVKGIAKSRKSGS

SEQ ID NO: 513 - protein, 1738 aa, synthetic construct
HHHHHHHHGPLEVLFQGPNMTNICPFDQVFNKTQFPSVYAWERVRISDCVSDYTVLYNSSASFSTFKCYGVSPTKLNDLCFSGVYADYFVVKGDHVHQIAPGQTGVIADYNYKLPSEFVGCILAWNTRTIDSKRGFYYRLFRHGNIRPYERDTSNVPYNAAGGTCNQPGTHNCYEPLQDYGFTSTSGVGYQPFRVVVLSFELLNAPATVCGPGSGGSGNITNLCPFGEVFNATKFPSVYAWERKKISNCVADYSVLYNSTFFSTFKCYGVSATKLNDLCFSNVYADSFVVKGDDVRQIAPGQTGVIADYNYKLPDDFMGCVLAWNTRNIDATSTGNYNYKRRYLRHGKLRPFERDISNVPFSPDGKPCTPPALNCYWPLNDYGFYTTTGIGYQPYRVVVLSFENKSAPATVCGPGSGGSGSSQCVNLTTRTQLPPAYTNSFTRGVYYPDKVFRSSVLHSTQDLFLPFFSNVTWFHAIHVSGTNGTKRFDNPVLPFNDGVYFASTEKSNIIRGWIFGTTLDSKTQSLLIVNNATNVVIKVCEFQFCNDPFLGVYYHKNNKSWMESEFRVYSSANNCTFEYVSQPFLMDLEGKQGNFKNLREFVFKNIDGYFKIYSKHTPINLVRDLPQGFSALEPLVDLPIGINITRFQTLLALHRSYLTPGDSSSGWTAGAAAYYVGYLQPRTFLLKYNENGTITDAVDCALDPLSETKCTLKSFTVEKGIYQTSNFRVQPTESIVRFPNITNLCPFGEVFNATRFASVYAWNRKRISNCVADYSVLYNSASFSTFKCYGVSPTKLNDLCFTNVYADSFVIRGDEVRQIAPGQTGKIADYNYKLPDDFTGCVIAWNSNNLDSKVGGNYNYLYRLFRKSNLKPFERDISTEIYQAGSTPCNGVEGFNCYFPLQSYGFQPTNGVGYQPYRVVVLSFELLHAPATVCGPKKSTNLVKNKCVNFNFNGLTGTGVLTESNKKFLPFQQFGRDIADTTDAVRDPQTLEILDITPCSFGGVSVITPGTNTSNQVAVLYQDVNCTEVPVAIHADQLTPTWRVYSTGSNVFQTRAGCLIGAEHVNNSYECDIPIGAGICASYQTQTNSPGSASSVASQSIIAYTMSLGAENSVAYSNNSIAIPTNFTISVTTEILPVSMTKTSVDCTMYICGDSTECSNLLLQYGSFCTQLNRALTGIAVEQDKNTQEVFAQVKQIYKTPPIKDFGGFNFSQILPDPSKPSKRSFIEDLLFNKVTLADAGFIKQYGDCLGDIAARDLICAQKFNGLTVLPPLLTDEMIAQYTSALLAGTITSGWTFGAGAALQIPFAMQMAYRFNGIGVTQNVLYENQKLIANQFNSAIGKIQDSLSSTASALGKLQDVVNQNAQALNTLVKQLSSNFGAISSVLNDILSRLDPPEAEVQIDRLITGRLQSLQTYVTQQLIRAAEIRASANLAATKMSECVLGQSKRVDFCGKGYHLMSFPQSAPHGVVFLHVTYVPAQEKNFTTAPAICHDGKAHFPREGVFVSNGTHWFVTQRNFYEPQIITTDNTFVSGNCDVVIGIVNNTVYDPLQSELDSIKEELDKIHKNGSGGSGDIIKLLNEQVNKEMQSSNLYMSMSSWCYTHSLDGAGLFLFDHAAEEYEHAKKLIIFLNENNVPVQLTSISAPEHKFEGLTQIFQKAYEHEQHISESINNIVDHAIKSKDHATFNFLQWYVAEQHEEEVLFKDILDKIELIGNENHGLYLADQYVKGIAKSRKSGS

SEQ ID NO: 514 - protein, 1722 aa, synthetic construct
HHHHHHHHGPLEVLFQGPNITNFCPFDKVFNATRFPNVYAWQRTKISDCIADYTVLYNSTSFSTFKCYGVSPSKLIDLCFTSVYADTFLIRFSEVRQIAPGETGVIADYNYKLPDDFTGCVLAWNTAQQDIGSYFYRSHRAVKLKPFERDLSSDENGVRTLSTYDFNPNVPLDYQATRVVVLSFELLNAPATVCGPGSGGSGNITNLCPFGEVFNATKFPSVYAWERKKISNCVADYSVLYNSTFFSTFKCYGVSATKLNDLCFSNVYADSFVVKGDDVRQIAPGQTGVIADYNYKLPDDFMGCVLAWNTRNIDATSTGNYNYKRRYLRHGKLRPFERDISNVPFSPDGKPCTPPALNCYWPLNDYGFYTTTGIGYQPYRVVVLSFENKSAPATVCGPGSGGSGSSQCVNLTTRTQLPPAYTNSFTRGVYYPDKVFRSSVLHSTQDLFLPFFSNVTWFHAIHVSGTNGTKRFDNPVLPFNDGVYFASTEKSNIIRGWIFGTTLDSKTQSLLIVNNATNVVIKVCEFQFCNDPFLGVYYHKNNKSWMESEFRVYSSANNCTFEYVSQPFLMDLEGKQGNFKNLREFVFKNIDGYFKIYSKHTPINLVRDLPQGFSALEPLVDLPIGINITRFQTLLALHRSYLTPGDSSSGWTAGAAAYYVGYLQPRTFLLKYNENGTITDAVDCALDPLSETKCTLKSFTVEKGIYQTSNFRVQPTESIVRFPNITNLCPFGEVFNATRFASVYAWNRKRISNCVADYSVLYNSASFSTFKCYGVSPTKLNDLCFTNVYADSFVIRGDEVRQIAPGQTGKIADYNYKLPDDFTGCVIAWNSNNLDSKVGGNYNYLYRLFRKSNLKPFERDISTEIYQAGSTPCNGVEGFNCYFPLQSYGFQPTNGVGYQPYRVVVLSFELLHAPATVCGPKKSTNLVKNKCVNFNFNGLTGTGVLTESNKKFLPFQQFGRDIADTTDAVRDPQTLEILDITPCSFGGVSVITPGTNTSNQVAVLYQDVNCTEVPVAIHADQLTPTWRVYSTGSNVFQTRAGCLIGAEHVNNSYECDIPIGAGICASYQTQTNSPGSASSVASQSIIAYTMSLGAENSVAYSNNSIAIPTNFTISVTTEILPVSMTKTSVDCTMYICGDSTECSNLLLQYGSFCTQLNRALTGIAVEQDKNTQEVFAQVKQIYKTPPIKDFGGFNFSQILPDPSKPSKRSFIEDLLFNKVTLADAGFIKQYGDCLGDIAARDLICAQKFNGLTVLPPLLTDEMIAQYTSALLAGTITSGWTFGAGAALQIPFAMQMAYRFNGIGVTQNVLYENQKLIANQFNSAIGKIQDSLSSTASALGKLQDVVNQNAQALNTLVKQLSSNFGAISSVLNDILSRLDPPEAEVQIDRLITGRLQSLQTYVTQQLIRAAEIRASANLAATKMSECVLGQSKRVDFCGKGYHLMSFPQSAPHGVVFLHVTYVPAQEKNFTTAPAICHDGKAHFPREGVFVSNGTHWFVTQRNFYEPQIITTDNTFVSGNCDVVIGIVNNTVYDPLQSELDSIKEELDKIHKNGSGGSGDIIKLLNEQVNKEMQSSNLYMSMSSWCYTHSLDGAGLFLFDHAAEEYEHAKKLIIFLNENNVPVQLTSISAPEHKFEGLTQIFQKAYEHEQHISESINNIVDHAIKSKDHATFNFLQWYVAEQHEEEVLFKDILDKIELIGNENHGLYLADQYVKGIAKSRKSGS

SEQ ID NO: 515 - protein, 1735 aa, synthetic construct
HHHHHHHHGPLEVLFQGPNITNLCPFSQVFNATRFPSVYAWTRERISNCIADYSVLYNSTSFSTFRCYGVSPTKLNDLCFSNVYADSMVVRGDEVRQIAPSQTGVIADYNYKLPDDFTGCVIAWNSKAKDENGQYFYRLFRKSKLLPFQRDVSNVTYGSGKNDGCNPSEADCYWPLLKYGFTSSVSQDYQPYRVVVLSFELLNAPATVCGPGSGGSGNMTNICPFDQVFNKTQFPSVYAWERVRISDCVSDYTVLYNSSASFSTFKCYGVSPTKLNDLCFSGVYADYFVVKGDHVHQIAPGQTGVIADYNYKLPSEFVGCILAWNTRTIDSKRGFYYRLFRHGNIRPYERDTSNVPYNAAGGTCNQPGTHNCYEPLQDYGFTSTSGVGYQPFRVVVLSFELLNAPATVCGPGSGGSGSSQCVNLTTRTQLPPAYTNSFTRGVYYPDKVFRSSVLHSTQDLFLPFFSNVTWFHAIHVSGTNGTKRFDNPVLPFNDGVYFASTEKSNIIRGWIFGTTLDSKTQSLLIVNNATNVVIKVCEFQFCNDPFLGVYYHKNNKSWMESEFRVYSSANNCTFEYVSQPFLMDLEGKQGNFKNLREFVFKNIDGYFKIYSKHTPINLVRDLPQGFSALEPLVDLPIGINITRFQTLLALHRSYLTPGDSSSGWTAGAAAYYVGYLQPRTFLLKYNENGTITDAVDCALDPLSETKCTLKSFTVEKGIYQTSNFRVQPTESIVRFPNITNLCPFGEVFNATRFASVYAWNRKRISNCVADYSVLYNSASFSTFKCYGVSPTKLNDLCFTNVYADSFVIRGDEVRQIAPGQTGKIADYNYKLPDDFTGCVIAWNSNNLDSKVGGNYNYLYRLFRKSNLKPFERDISTEIYQAGSTPCNGVEGFNCYFPLQSYGFQPTNGVGYQPYRVVVLSFELLHAPATVCGPKKSTNLVKNKCVNFNFNGLTGTGVLTESNKKFLPFQQFGRDIADTTDAVRDPQTLEILDITPCSFGGVSVITPGTNTSNQVAVLYQDVNCTEVPVAIHADQLTPTWRVYSTGSNVFQTRAGCLIGAEHVNNSYECDIPIGAGICASYQTQTNSPGSASSVASQSIIAYTMSLGAENSVAYSNNSIAIPTNFTISVTTEILPVSMTKTSVDCTMYICGDSTECSNLLLQYGSFCTQLNRALTGIAVEQDKNTQEVFAQVKQIYKTPPIKDFGGFNFSQILPDPSKPSKRSFIEDLLFNKVTLADAGFIKQYGDCLGDIAARDLICAQKFNGLTVLPPLLTDEMIAQYTSALLAGTITSGWTFGAGAALQIPFAMQMAYRFNGIGVTQNVLYENQKLIANQFNSAIGKIQDSLSSTASALGKLQDVVNQNAQALNTLVKQLSSNFGAISSVLNDILSRLDPPEAEVQIDRLITGRLQSLQTYVTQQLIRAAEIRASANLAATKMSECVLGQSKRVDFCGKGYHLMSFPQSAPHGVVFLHVTYVPAQEKNFTTAPAICHDGKAHFPREGVFVSNGTHWFVTQRNFYEPQIITTDNTFVSGNCDVVIGIVNNTVYDPLQSELDSIKEELDKIHKNGSGGSGDIIKLLNEQVNKEMQSSNLYMSMSSWCYTHSLDGAGLFLFDHAAEEYEHAKKLIIFLNENNVPVQLTSISAPEHKFEGLTQIFQKAYEHEQHISESINNIVDHAIKSKDHATFNFLQWYVAEQHEEEVLFKDILDKIELIGNENHGLYLADQYVKGIAKSRKSGS

SEQ ID NO: 516 - protein, 1719 aa, synthetic construct
HHHHHHHHGPLEVLFQGPNITNLCPFSQVFNATRFPSVYAWTRERISNCIADYSVLYNSTSFSTFRCYGVSPTKLNDLCFSNVYADSMVVRGDEVRQIAPSQTGVIADYNYKLPDDFTGCVIAWNSKAKDENGQYFYRLFRKSKLLPFQRDVSNVTYGSGKNDGCNPSEADCYWPLLKYGFTSSVSQDYQPYRVVVLSFELLNAPATVCGPGSGGSGNITNFCPFDKVFNATRFPNVYAWQRTKISDCIADYTVLYNSTSFSTFKCYGVSPSKLIDLCFTSVYADTFLIRFSEVRQIAPGETGVIADYNYKLPDDFTGCVLAWNTAQQDIGSYFYRSHRAVKLKPFERDLSSDENGVRTLSTYDFNPNVPLDYQATRVVVLSFELLNAPATVCGPGSGGSGSSQCVNLTTRTQLPPAYTNSFTRGVYYPDKVFRSSVLHSTQDLFLPFFSNVTWFHAIHVSGTNGTKRFDNPVLPFNDGVYFASTEKSNIIRGWIFGTTLDSKTQSLLIVNNATNVVIKVCEFQFCNDPFLGVYYHKNNKSWMESEFRVYSSANNCTFEYVSQPFLMDLEGKQGNFKNLREFVFKNIDGYFKIYSKHTPINLVRDLPQGFSALEPLVDLPIGINITRFQTLLALHRSYLTPGDSSSGWTAGAAAYYVGYLQPRTFLLKYNENGTITDAVDCALDPLSETKCTLKSFTVEKGIYQTSNFRVQPTESIVRFPNITNLCPFGEVFNATRFASVYAWNRKRISNCVADYSVLYNSASFSTFKCYGVSPTKLNDLCFTNVYADSFVIRGDEVRQIAPGQTGKIADYNYKLPDDFTGCVIAWNSNNLDSKVGGNYNYLYRLFRKSNLKPFERDISTEIYQAGSTPCNGVEGFNCYFPLQSYGFQPTNGVGYQPYRVVVLSFELLHAPATVCGPKKSTNLVKNKCVNFNFNGLTGTGVLTESNKKFLPFQQFGRDIADTTDAVRDPQTLEILDITPCSFGGVSVITPGTNTSNQVAVLYQDVNCTEVPVAIHADQLTPTWRVYSTGSNVFQTRAGCLIGAEHVNNSYECDIPIGAGICASYQTQTNSPGSASSVASQSIIAYTMSLGAENSVAYSNNSIAIPTNFTISVTTEILPVSMTKTSVDCTMYICGDSTECSNLLLQYGSFCTQLNRALTGIAVEQDKNTQEVFAQVKQIYKTPPIKDFGGFNFSQILPDPSKPSKRSFIEDLLFNKVTLADAGFIKQYGDCLGDIAARDLICAQKFNGLTVLPPLLTDEMIAQYTSALLAGTITSGWTFGAGAALQIPFAMQMAYRFNGIGVTQNVLYENQKLIANQFNSAIGKIQDSLSSTASALGKLQDVVNQNAQALNTLVKQLSSNFGAISSVLNDILSRLDPPEAEVQIDRLITGRLQSLQTYVTQQLIRAAEIRASANLAATKMSECVLGQSKRVDFCGKGYHLMSFPQSAPHGVVFLHVTYVPAQEKNFTTAPAICHDGKAHFPREGVFVSNGTHWFVTQRNFYEPQIITTDNTFVSGNCDVVIGIVNNTVYDPLQSELDSIKEELDKIHKNGSGGSGDIIKLLNEQVNKEMQSSNLYMSMSSWCYTHSLDGAGLFLFDHAAEEYEHAKKLIIFLNENNVPVQLTSISAPEHKFEGLTQIFQKAYEHEQHISESINNIVDHAIKSKDHATFNFLQWYVAEQHEEEVLFKDILDKIELIGNENHGLYLADQYVKGIAKSRKSGS

SEQ ID NO: 517 - protein, 1937 aa, synthetic construct
HHHHHHHHGPLEVLFQGPNMTNICPFDQVFNKTQFPSVYAWERVRISDCVSDYTVLYNSSASFSTFKCYGVSPTKLNDLCFSGVYADYFVVKGDHVHQIAPGQTGVIADYNYKLPSEFVGCILAWNTRTIDSKRGFYYRLFRHGNIRPYERDTSNVPYNAAGGTCNQPGTHNCYEPLQDYGFTSTSGVGYQPFRVVVLSFELLNAPATVCGPGSGGSGNITNLCPFSQVFNATRFPSVYAWTRERISNCIADYSVLYNSTSFSTFRCYGVSPTKLNDLCFSNVYADSMVVRGDEVRQIAPSQTGVIADYNYKLPDDFTGCVIAWNSKAKDENGQYFYRLFRKSKLLPFQRDVSNVTYGSGKNDGCNPSEADCYWPLLKYGFTSSVSQDYQPYRVVVLSFELLNAPATVCGPGSGGSGNITNLCPFGEVFNATKFPSVYAWERKKISNCVADYSVLYNSTFFSTFKCYGVSATKLNDLCFSNVYADSFVVKGDDVRQIAPGQTGVIADYNYKLPDDFMGCVLAWNTRNIDATSTGNYNYKRRYLRHGKLRPFERDISNVPFSPDGKPCTPPALNCYWPLNDYGFYTTTGIGYQPYRVVVLSFENKSAPATVCGPGSGGSGSSQCVNLTTRTQLPPAYTNSFTRGVYYPDKVFRSSVLHSTQDLFLPFFSNVTWFHAIHVSGTNGTKRFDNPVLPFNDGVYFASTEKSNIIRGWIFGTTLDSKTQSLLIVNNATNVVIKVCEFQFCNDPFLGVYYHKNNKSWMESEFRVYSSANNCTFEYVSQPFLMDLEGKQGNFKNLREFVFKNIDGYFKIYSKHTPINLVRDLPQGFSALEPLVDLPIGINITRFQTLLALHRSYLTPGDSSSGWTAGAAAYYVGYLQPRTFLLKYNENGTITDAVDCALDPLSETKCTLKSFTVEKGIYQTSNFRVQPTESIVRFPNITNLCPFGEVFNATRFASVYAWNRKRISNCVADYSVLYNSASFSTFKCYGVSPTKLNDLCFTNVYADSFVIRGDEVRQIAPGQTGKIADYNYKLPDDFTGCVIAWNSNNLDSKVGGNYNYLYRLFRKSNLKPFERDISTEIYQAGSTPCNGVEGFNCYFPLQSYGFQPTNGVGYQPYRVVVLSFELLHAPATVCGPKKSTNLVKNKCVNFNFNGLTGTGVLTESNKKFLPFQQFGRDIADTTDAVRDPQTLEILDITPCSFGGVSVITPGTNTSNQVAVLYQDVNCTEVPVAIHADQLTPTWRVYSTGSNVFQTRAGCLIGAEHVNNSYECDIPIGAGICASYQTQTNSPGSASSVASQSIIAYTMSLGAENSVAYSNNSIAIPTNFTISVTTEILPVSMTKTSVDCTMYICGDSTECSNLLLQYGSFCTQLNRALTGIAVEQDKNTQEVFAQVKQIYKTPPIKDFGGFNFSQILPDPSKPSKRSFIEDLLFNKVTLADAGFIKQYGDCLGDIAARDLICAQKFNGLTVLPPLLTDEMIAQYTSALLAGTITSGWTFGAGAALQIPFAMQMAYRFNGIGVTQNVLYENQKLIANQFNSAIGKIQDSLSSTASALGKLQDVVNQNAQALNTLVKQLSSNFGAISSVLNDILSRLDPPEAEVQIDRLITGRLQSLQTYVTQQLIRAAEIRASANLAATKMSECVLGQSKRVDFCGKGYHLMSFPQSAPHGVVFLHVTYVPAQEKNFTTAPAICHDGKAHFPREGVFVSNGTHWFVTQRNFYEPQIITTDNTFVSGNCDVVIGIVNNTVYDPLQSELDSIKEELDKIHKNGSGGSGDIIKLLNEQVNKEMQSSNLYMSMSSWCYTHSLDGAGLFLFDHAAEEYEHAKKLIIFLNENNVPVQLTSISAPEHKFEGLTQIFQKAYEHEQHISESINNIVDHAIKSKDHATFNFLQWYVAEQHEEEVLFKDILDKIELIGNENHGLYLADQYVKGIAKSRKSGS

SEQ ID NO: 518 - protein, 1921 aa, synthetic construct
HHHHHHHHGPLEVLFQGPNITNFCPFDKVFNATRFPNVYAWQRTKISDCIADYTVLYNSTSFSTFKCYGVSPSKLIDLCFTSVYADTFLIRFSEVRQIAPGETGVIADYNYKLPDDFTGCVLAWNTAQQDIGSYFYRSHRAVKLKPFERDLSSDENGVRTLSTYDFNPNVPLDYQATRVVVLSFELLNAPATVCGPGSGGSGNITNLCPFSQVFNATRFPSVYAWTRERISNCIADYSVLYNSTSFSTFRCYGVSPTKLNDLCFSNVYADSMVVRGDEVRQIAPSQTGVIADYNYKLPDDFTGCVIAWNSKAKDENGQYFYRLFRKSKLLPFQRDVSNVTYGSGKNDGCNPSEADCYWPLLKYGFTSSVSQDYQPYRVVVLSFELLNAPATVCGPGSGGSGNITNLCPFGEVFNATKFPSVYAWERKKISNCVADYSVLYNSTFFSTFKCYGVSATKLNDLCFSNVYADSFVVKGDDVRQIAPGQTGVIADYNYKLPDDFMGCVLAWNTRNIDATSTGNYNYKRRYLRHGKLRPFERDISNVPFSPDGKPCTPPALNCYWPLNDYGFYTTTGIGYQPYRVVVLSFENKSAPATVCGPGSGGSGSSQCVNLTTRTQLPPAYTNSFTRGVYYPDKVFRSSVLHSTQDLFLPFFSNVTWFHAIHVSGTNGTKRFDNPVLPFNDGVYFASTEKSNIIRGWIFGTTLDSKTQSLLIVNNATNVVIKVCEFQFCNDPFLGVYYHKNNKSWMESEFRVYSSANNCTFEYVSQPFLMDLEGKQGNFKNLREFVFKNIDGYFKIYSKHTPINLVRDLPQGFSALEPLVDLPIGINITRFQTLLALHRSYLTPGDSSSGWTAGAAAYYVGYLQPRTFLLKYNENGTITDAVDCALDPLSETKCTLKSFTVEKGIYQTSNFRVQPTESIVRFPNITNLCPFGEVFNATRFASVYAWNRKRISNCVADYSVLYNSASFSTFKCYGVSPTKLNDLCFTNVYADSFVIRGDEVRQIAPGQTGKIADYNYKLPDDFTGCVIAWNSNNLDSKVGGNYNYLYRLFRKSNLKPFERDISTEIYQAGSTPCNGVEGFNCYFPLQSYGFQPTNGVGYQPYRVVVLSFELLHAPATVCGPKKSTNLVKNKCVNFNFNGLTGTGVLTESNKKFLPFQQFGRDIADTTDAVRDPQTLEILDITPCSFGGVSVITPGTNTSNQVAVLYQDVNCTEVPVAIHADQLTPTWRVYSTGSNVFQTRAGCLIGAEHVNNSYECDIPIGAGICASYQTQTNSPGSASSVASQSIIAYTMSLGAENSVAYSNNSIAIPTNFTISVTTEILPVSMTKTSVDCTMYICGDSTECSNLLLQYGSFCTQLNRALTGIAVEQDKNTQEVFAQVKQIYKTPPIKDFGGFNFSQILPDPSKPSKRSFIEDLLFNKVTLADAGFIKQYGDCLGDIAARDLICAQKFNGLTVLPPLLTDEMIAQYTSALLAGTITSGWTFGAGAALQIPFAMQMAYRFNGIGVTQNVLYENQKLIANQFNSAIGKIQDSLSSTASALGKLQDVVNQNAQALNTLVKQLSSNFGAISSVLNDILSRLDPPEAEVQIDRLITGRLQSLQTYVTQQLIRAAEIRASANLAATKMSECVLGQSKRVDFCGKGYHLMSFPQSAPHGVVFLHVTYVPAQEKNFTTAPAICHDGKAHFPREGVFVSNGTHWFVTQRNFYEPQIITTDNTFVSGNCDVVIGIVNNTVYDPLQSELDSIKEELDKIHKNGSGGSGDIIKLLNEQVNKEMQSSNLYMSMSSWCYTHSLDGAGLFLFDHAAEEYEHAKKLIIFLNENNVPVQLTSISAPEHKFEGLTQIFQKAYEHEQHISESINNIVDHAIKSKDHATFNFLQWYVAEQHEEEVLFKDILDKIELIGNENHGLYLADQYVKGIAKSRKSGS

SEQ ID NO: 519 - protein, 2133 aa, synthetic construct
HHHHHHHHGPLEVLFQGPNITNLCPFSQVFNATRFPSVYAWTRERISNCIADYSVLYNSTSFSTFRCYGVSPTKLNDLCFSNVYADSMVVRGDEVRQIAPSQTGVIADYNYKLPDDFTGCVIAWNSKAKDENGQYFYRLFRKSKLLPFQRDVSNVTYGSGKNDGCNPSEADCYWPLLKYGFTSSVSQDYQPYRVVVLSFELLNAPATVCGPGSGGSGNITNLCPFGEVFNATKFPSVYAWERKKISNCVADYSVLYNSTFFSTFKCYGVSATKLNDLCFSNVYADSFVVKGDDVRQIAPGQTGVIADYNYKLPDDFMGCVLAWNTRNIDATSTGNYNYKRRYLRHGKLRPFERDISNVPFSPDGKPCTPPALNCYWPLNDYGFYTTTGIGYQPYRVVVLSFENKSAPATVCGPGSGGSGSSQCVNLTTRTQLPPAYTNSFTRGVYYPDKVFRSSVLHSTQDLFLPFFSNVTWFHAIHVGSGGSGNMTNICPFDQVFNKTQFPSVYAWERVRISDCVSDYTVLYNSSASFSTFKCYGVSPTKLNDLCFSGVYADYFVVKGDHVHQIAPGQTGVIADYNYKLPSEFVGCILAWNTRTIDSKRGFYYRLFRHGNIRPYERDTSNVPYNAAGGTCNQPGTHNCYEPLQDYGFTSTSGVGYQPFRVVVLSFELLNAPATVCGPGSGGSGSGTNGTKRFDNPVLPFNDGVYFASTEKSNIIRGWIFGTTLDSKTQSLLIVNNATNVVIKVCEFQFCNDPFLGVYYHKNGSGGSGNITNFCPFDKVFNATRFPNVYAWQRTKISDCIADYTVLYNSTSFSTFKCYGVSPSKLIDLCFTSVYADTFLIRFSEVRQIAPGETGVIADYNYKLPDDFTGCVLAWNTAQQDIGSYFYRSHRAVKLKPFERDLSSDENGVRTLSTYDFNPNVPLDYQATRVVVLSFELLNAPATVCGPGSGGSGNKSWMESEFRVYSSANNCTFEYVSQPFLMDLEGKQGNFKNLREFVFKNIDGYFKIYSKHTPINLVRDLPQGFSALEPLVDLPIGINITRFQTLLALHRSYLTPGDSSSGWTAGAAAYYVGYLQPRTFLLKYNENGTITDAVDCALDPLSETKCTLKSFTVEKGIYQTSNFRVQPTESIVRFPNITNLCPFGEVFNATRFASVYAWNRKRISNCVADYSVLYNSASFSTFKCYGVSPTKLNDLCFTNVYADSFVIRGDEVRQIAPGQTGKIADYNYKLPDDFTGCVIAWNSNNLDSKVGGNYNYLYRLFRKSNLKPFERDISTEIYQAGSTPCNGVEGFNCYFPLQSYGFQPTNGVGYQPYRVVVLSFELLHAPATVCGPKKSTNLVKNKCVNFNFNGLTGTGVLTESNKKFLPFQQFGRDIADTTDAVRDPQTLEILDITPCSFGGVSVITPGTNTSNQVAVLYQDVNCTEVPVAIHADQLTPTWRVYSTGSNVFQTRAGCLIGAEHVNNSYECDIPIGAGICASYQTQTNSPGSASSVASQSIIAYTMSLGAENSVAYSNNSIAIPTNFTISVTTEILPVSMTKTSVDCTMYICGDSTECSNLLLQYGSFCTQLNRALTGIAVEQDKNTQEVFAQVKQIYKTPPIKDFGGFNFSQILPDPSKPSKRSFIEDLLFNKVTLADAGFIKQYGDCLGDIAARDLICAQKFNGLTVLPPLLTDEMIAQYTSALLAGTITSGWTFGAGAALQIPFAMQMAYRFNGIGVTQNVLYENQKLIANQFNSAIGKIQDSLSSTASALGKLQDVVNQNAQALNTLVKQLSSNFGAISSVLNDILSRLDPPEAEVQIDRLITGRLQSLQTYVTQQLIRAAEIRASANLAATKMSECVLGQSKRVDFCGKGYHLMSFPQSAPHGVVFLHVTYVPAQEKNFTTAPAICHDGKAHFPREGVFVSNGTHWFVTQRNFYEPQIITTDNTFVSGNCDVVIGIVNNTVYDPLQSELDSIKEELDKIHKNGSGGSGDIIKLLNEQVNKEMQSSNLYMSMSSWCYTHSLDGAGLFLFDHAAEEYEHAKKLIIFLNENNVPVQLTSISAPEHKFEGLTQIFQKAYEHEQHISESINNIVDHAIKSKDHATFNFLQWYVAEQHEEEVLFKDILDKIELIGNENHGLYLADQYVKGIAKSRKSGS

SEQ ID NO: 520 - protein, 2133 aa, synthetic construct
HHHHHHHHGPLEVLFQGPNITNLCPFSQVFNATRFPSVYAWTRERISNCIADYSVLYNSTSFSTFRCYGVSPTKLNDLCFSNVYADSMVVRGDEVRQIAPSQTGVIADYNYKLPDDFTGCVIAWNSKAKDENGQYFYRLFRKSKLLPFQRDVSNVTYGSGKNDGCNPSEADCYWPLLKYGFTSSVSQDYQPYRVVVLSFELLNAPATVCGPGSGGSGNITNLCPFGEVFNATKFPSVYAWERKKISNCVADYSVLYNSTFFSTFKCYGVSATKLNDLCFSNVYADSFVVKGDDVRQIAPGQTGVIADYNYKLPDDFMGCVLAWNTRNIDATSTGNYNYKRRYLRHGKLRPFERDISNVPFSPDGKPCTPPALNCYWPLNDYGFYTTTGIGYQPYRVVVLSFENKSAPATVCGPGSGGSGSSQCVNLTTRTQLPPAYTNSFTRGVYYPDKVFRSSVLHSTQDLFLPFFSNVTWFHAIHVGSGGSGNITNFCPFDKVFNATRFPNVYAWQRTKISDCIADYTVLYNSTSFSTFKCYGVSPSKLIDLCFTSVYADTFLIRFSEVRQIAPGETGVIADYNYKLPDDFTGCVLAWNTAQQDIGSYFYRSHRAVKLKPFERDLSSDENGVRTLSTYDFNPNVPLDYQATRVVVLSFELLNAPATVCGPGSGGSGSGTNGTKRFDNPVLPFNDGVYFASTEKSNIIRGWIFGTTLDSKTQSLLIVNNATNVVIKVCEFQFCNDPFLGVYYHKNGSGGSGNMTNICPFDQVFNKTQFPSVYAWERVRISDCVSDYTVLYNSSASFSTFKCYGVSPTKLNDLCFSGVYADYFVVKGDHVHQIAPGQTGVIADYNYKLPSEFVGCILAWNTRTIDSKRGFYYRLFRHGNIRPYERDTSNVPYNAAGGTCNQPGTHNCYEPLQDYGFTSTSGVGYQPFRVVVLSFELLNAPATVCGPGSGGSGNKSWMESEFRVYSSANNCTFEYVSQPFLMDLEGKQGNFKNLREFVFKNIDGYFKIYSKHTPINLVRDLPQGFSALEPLVDLPIGINITRFQTLLALHRSYLTPGDSSSGWTAGAAAYYVGYLQPRTFLLKYNENGTITDAVDCALDPLSETKCTLKSFTVEKGIYQTSNFRVQPTESIVRFPNITNLCPFGEVFNATRFASVYAWNRKRISNCVADYSVLYNSASFSTFKCYGVSPTKLNDLCFTNVYADSFVIRGDEVRQIAPGQTGKIADYNYKLPDDFTGCVIAWNSNNLDSKVGGNYNYLYRLFRKSNLKPFERDISTEIYQAGSTPCNGVEGFNCYFPLQSYGFQPTNGVGYQPYRVVVLSFELLHAPATVCGPKKSTNLVKNKCVNFNFNGLTGTGVLTESNKKFLPFQQFGRDIADTTDAVRDPQTLEILDITPCSFGGVSVITPGTNTSNQVAVLYQDVNCTEVPVAIHADQLTPTWRVYSTGSNVFQTRAGCLIGAEHVNNSYECDIPIGAGICASYQTQTNSPGSASSVASQSIIAYTMSLGAENSVAYSNNSIAIPTNFTISVTTEILPVSMTKTSVDCTMYICGDSTECSNLLLQYGSFCTQLNRALTGIAVEQDKNTQEVFAQVKQIYKTPPIKDFGGFNFSQILPDPSKPSKRSFIEDLLFNKVTLADAGFIKQYGDCLGDIAARDLICAQKFNGLTVLPPLLTDEMIAQYTSALLAGTITSGWTFGAGAALQIPFAMQMAYRFNGIGVTQNVLYENQKLIANQFNSAIGKIQDSLSSTASALGKLQDVVNQNAQALNTLVKQLSSNFGAISSVLNDILSRLDPPEAEVQIDRLITGRLQSLQTYVTQQLIRAAEIRASANLAATKMSECVLGQSKRVDFCGKGYHLMSFPQSAPHGVVFLHVTYVPAQEKNFTTAPAICHDGKAHFPREGVFVSNGTHWFVTQRNFYEPQIITTDNTFVSGNCDVVIGIVNNTVYDPLQSELDSIKEELDKIHKNGSGGSGDIIKLLNEQVNKEMQSSNLYMSMSSWCYTHSLDGAGLFLFDHAAEEYEHAKKLIIFLNENNVPVQLTSISAPEHKFEGLTQIFQKAYEHEQHISESINNIVDHAIKSKDHATFNFLQWYVAEQHEEEVLFKDILDKIELIGNENHGLYLADQYVKGIAKSRKSGS

SEQ ID NO: 521 - protein, 206 aa, synthetic construct
MDSKGSSQKGSRLLLLLVVSNLLLPQGVVGQESQVRQQFSKDIEKLLNEQVNKEMQSSNLYMSMSSWCYTHSLDGAGLFLFDHAAEEYEHAKKLIIFLNENNVPVQLTSISAPEHKFEGLTQIFQKAYEHEQHISESINNIVDHAIKSKDHATFNFLQWYVAEQHEEEVLFKDILDKIELIGNENHGLYLADQYVKGIAKSRKSGS

SEQ ID NO: 522 - protein, 409 aa, synthetic construct
MDSKGSSQKGSRLLLLLVVSNLLLPQGVVGQNITNLCPFGEVFNATRFASVYAWNRKRISNCVADYSVLYNSASFSTFKCYGVSPTKLNDLCFTNVYADSFVIRGDEVRQIAPGQTGKIADYNYKLPDDFTGCVIAWNSNNLDSKVGGNYNYLRRLFRKSNLKPFERDISTEIYQAGSTPCNGVEGFNCYFPLQSYGFQPTNGVGYQPYRVVVLSFENKSAPATVCGGGSGGSGESQVRQQFSKDIEKLLNEQVNKEMQSSNLYMSMSSWCYTHSLDGAGLFLFDHAAEEYEHAKKLIIFLNENNVPVQLTSISAPEHKFEGLTQIFQKAYEHEQHISESINNIVDHAIKSKDHATFNFLQWYVAEQHEEEVLFKDILDKIELIGNENHGLYLADQYVKGIAKSRKSGS

SEQ ID NO: 523 - protein, 409 aa, synthetic construct; identical to SEQ ID NO: 476

SEQ ID NO: 524 - protein, 409 aa, synthetic construct; identical to SEQ ID NO: 505

SEQ ID NO: 525 - protein, 408 aa, synthetic construct
MDSKGSSQKGSRLLLLLVVSNLLLPQGVVGQNITNLCPFGEVFNATKFPSVYAWERKKISNCVADYSVLYNSTFFSTFKCYGVSATKLNDLCFSNVYADSFVVKGDDVRQIAPGQTGVIADYNYKLPDDFMGCVLAWNTRNIDATSTGNYNYKRRYLRHGKLRPFERDISNVPFSPDGKPCTPPALNCYWPLNDYGFYTTTGIGYQPYRVVVLSFENKSAPATVCGGGSGGSGESQVRQQFSKDIEKLLNEQVNKEMQSSNLYMSMSSWCYTHSLDGAGLFLFDHAAEEYEHAKKLIIFLNENNVPVQLTSISAPEHKFEGLTQIFQKAYEHEQHISESINNIVDHAIKSKDHATFNFLQWYVAEQHEEEVLFKDILDKIELIGNENHGLYLADQYVKGIAKSRKSGS

SEQ ID NO: 526 - protein, 406 aa, synthetic construct; identical to SEQ ID NO: 478

SEQ ID NO: 527 - protein, 390 aa, synthetic construct; identical to SEQ ID NO: 479

SEQ ID NO: 528 - protein, 421 aa, synthetic construct
MDSKGSSQKGSRLLLLLVVSNLLLPQGVVGQEGVECDFSPLLSGTPPQVYNFKRLVFTNCNYNLTKLLSLFSVNDFTCSQISPAAIASNCYSSLILDYFSYPLSMKSDLSVSSAGPISQFNYKQSFSNPTCLILATVPHNLTTITKPLKYSYINKCSRLLSDDRTEVPQLVNANQYSPCVSIVPSTVAEDGDYYRKQLSPLEGGGWLVASGSTVAMTEQLQMGFGITVQNGTDTNSVCGGGSGGSGESQVRQQFSKDIEKLLNEQVNKEMQSSNLYMSMSSWCYTHSLDGAGLFLFDHAAEEYEHAKKLIIFLNENNVPVQLTSISAPEHKFEGLTQIFQKAYEHEQHISESINNIVDHAIKSKDHATFNFLQWYVAEQHEEEVLFKDILDKIELIGNENHGLYLADQYVKGIAKSRKSGS

SEQ ID NO: 529 - protein, 1349 aa, synthetic construct
MDSKGSSQKGSRLLLLLVVSNLLLPQGVVGQSSQCVNLTTRTQLPPAYTNSFTRGVYYPDKVFRSSVLHSTQDLFLPFFSNVTWFHAIHVSGTNGTKRFDNPVLPFNDGVYFASTEKSNIIRGWIFGTTLDSKTQSLLIVNNATNVVIKVCEFQFCNDPFLGVYYHKNNKSWMESEFRVYSSANNCTFEYVSQPFLMDLEGKQGNFKNLREFVFKNIDGYFKIYSKHTPINLVRDLPQGFSALEPLVDLPIGINITRFQTLLALHRSYLTPGDSSSGWTAGAAAYYVGYLQPRTFLLKYNENGTITDAVDCALDPLSETKCTLKSFTVEKGIYQTSNFRVQPTESIVRFPNITNLCPFGEVFNATRFASVYAWNRKRISNCVADYSVLYNSASFSTFKCYGVSPTKLNDLCFTNVYADSFVIRGDEVRQIAPGQTGKIADYNYKLPDDFTGCVIAWNSNNLDSKVGGNYNYLYRLFRKSNLKPFERDISTEIYQAGSTPCNGVEGFNCYFPLQSYGFQPTNGVGYQPYRVVVLSFELLHAPATVCGPKKSTNLVKNKCVNFNFNGLTGTGVLTESNKKFLPFQQFGRDIADTTDAVRDPQTLEILDITPCSFGGVSVITPGTNTSNQVAVLYQDVNCTEVPVAIHADQLTPTWRVYSTGSNVFQTRAGCLIGAEHVNNSYECDIPIGAGICASYQTQTNSPGSASSVASQSIIAYTMSLGAENSVAYSNNSIAIPTNFTISVTTEILPVSMTKTSVDCTMYICGDSTECSNLLLQYGSFCTQLNRALTGIAVEQDKNTQEVFAQVKQIYKTPPIKDFGGFNFSQILPDPSKPSKRSFIEDLLFNKVTLADAGFIKQYGDCLGDIAARDLICAQKFNGLTVLPPLLTDEMIAQYTSALLAGTITSGWTFGAGAALQIPFAMQMAYRFNGIGVTQNVLYENQKLIANQFNSAIGKIQDSLSSTASALGKLQDVVNQNAQALNTLVKQLSSNFGAISSVLNDILSRLDPPEAEVQIDRLITGRLQSLQTYVTQQLIRAAEIRASANLAATKMSECVLGQSKRVDFCGKGYHLMSFPQSAPHGVVFLHVTYVPAQEKNFTTAPAICHDGKAHFPREGVFVSNGTHWFVTQRNFYEPQIITTDNTFVSGNCDVVIGIVNNTVYDPLQSELDSIKEELDKIHKNGSGGSGDIIKLLNEQVNKEMQSSNLYMSMSSWCYTHSLDGAGLFLFDHAAEEYEHAKKLIIFLNENNVPVQLTSISAPEHKFEGLTQIFQKAYEHEQHISESINNIVDHAIKSKDHATFNFLQWYVAEQHEEEVLFKDILDKIELIGNENHGLYLADQYVKGIAKSRKSGS

SEQ ID NO: 530 - protein, 1346 aa, synthetic construct
MDSKGSSQKGSRLLLLLVVSNLLLPQGVVGQSSQCVNFTTRTQLPPAYTNSFTRGVYYPDKVFRSSVLHSTQDLFLPFFSNVTWFHAIHVSGTNGTKRFANPVLPFNDGVYFASTEKSNIIRGWIFGTTLDSKTQSLLIVNNATNVVIKVCEFQFCNDPFLGVYYHKNNKSWMESEFRVYSSANNCTFEYVSQPFLMDLEGKQGNFKNLREFVFKNIDGYFKIYSKHTPINLVRGLPQGFSALEPLVDLPIGINITRFQTLHISYLTPGDSSSGWTAGAAAYYVGYLQPRTFLLKYNENGTITDAVDCALDPLSETKCTLKSFTVEKGIYQTSNFRVQPTESIVRFPNITNLCPFGEVFNATRFASVYAWNRKRISNCVADYSVLYNSASFSTFKCYGVSPTKLNDLCFTNVYADSFVIRGDEVRQIAPGQTGNIADYNYKLPDDFTGCVIAWNSNNLDSKVGGNYNYLYRLFRKSNLKPFERDISTEIYQAGSTPCNGVKGFNCYFPLQSYGFQPTYGVGYQPYRVVVLSFELLHAPATVCGPKKSTNLVKNKCVNFNFNGLTGTGVLTESNKKFLPFQQFGRDIADTTDAVRDPQTLEILDITPCSFGGVSVITPGTNTSNQVAVLYQGVNCTEVPVAIHADQLTPTWRVYSTGSNVFQTRAGCLIGAEHVNNSYECDIPIGAGICASYQTQTNSPGSASSVASQSIIAYTMSLGVENSVAYSNNSIAIPTNFTISVTTEILPVSMTKTSVDCTMYICGDSTECSNLLLQYGSFCTQLNRALTGIAVEQDKNTQEVFAQVKQIYKTPPIKDFGGFNFSQILPDPSKPSKRSFIEDLLFNKVTLADAGFIKQYGDCLGDIAARDLICAQKFNGLTVLPPLLTDEMIAQYTSALLAGTITSGWTFGAGAALQIPFAMQMAYRFNGIGVTQNVLYENQKLIANQFNSAIGKIQDSLSSTASALGKLQDVVNQNAQALNTLVKQLSSNFGAISSVLNDILSRLDPPEAEVQIDRLITGRLQSLQTYVTQQLIRAAEIRASANLAATKMSECVLGQSKRVDFCGKGYHLMSFPQSAPHGVVFLHVTYVPAQEKNFTTAPAICHDGKAHFPREGVFVSNGTHWFVTQRNFYEPQIITTDNTFVSGNCDVVIGIVNNTVYDPLQSELDSIKEELDKIHKNGSGGSGDIIKLLNEQVNKEMQSSNLYMSMSSWCYTHSLDGAGLFLFDHAAEEYEHAKKLIIFLNENNVPVQLTSISAPEHKFEGLTQIFQKAYEHEQHISESINNIVDHAIKSKDHATFNFLQWYVAEQHEEEVLFKDILDKIELIGNENHGLYLADQYVKGIAKSRKSGS

SEQ ID NO: 531 - protein, 1344 aa, synthetic construct; identical to SEQ ID NO: 506

SEQ ID NO: 532 - protein, 1329 aa, synthetic construct
MDSKGSSQKGSRLLLLLVVSNLLLPQGVVGQSDLDRCTTFDDVQAPNYTQHTSSMRGVYYPDEIFRSDTLYLTQDLFLPFYSNVTGFHTINHTFGNPVIPFKDGIYFAATEKSNVVRGWVFGSTMNNKSQSVIIINNSTNVVIRACNFELCDNPFFAVSKPMGTQTHTMIFDNAFNCTFEYISDAFSLDVSEKSGNFKHLREFVFKNKDGFLYVYKGYQPIDVVRDLPSGFNTLKPIFKLPLGINITNFRAILTAFSPAQDIWGTSAAAYFVGYLKPTTFMLKYDENGTITDAVDCSQNPLAELKCSVKSFEIDKGIYQTSNFRVVPSGDVVRFPNITNLCPFGEVFNATKFPSVYAWERKKISNCVADYSVLYNSTFFSTFKCYGVSATKLNDLCFSNVYADSFVVKGDDVRQIAPGQTGVIADYNYKLPDDFMGCVLAWNTRNIDATSTGNYNYKYRYLRHGKLRPFERDISNVPFSPDGKPCTPPALNCYWPLNDYGFYTTTGIGYQPYRVVVLSFELLNAPATVCGPKLSTDLIKNQCVNFNFNGLTGTGVLTPSSKRFQPFQQFGRDVSDFTDSVRDPKTSEILDISPCAFGGVSVITPGTNASSEVAVLYQDVNCTDVSTAIHADQLTPAWRIYSTGNNVFQTQAGCLIGAEHVDTSYECDIPIGAGICASYHTVSLLRSTSQKSIVAYTMSLGADSSIAYSNNTIAIPTNFSISITTEVMPVSMAKTSVDCNMYICGDSTECANLLLQYGSFCTQLNRALSGIAAEQDRNTREVFAQVKQMYKTPTLKYFGGFNFSQILPDPLKPTKRSFIEDLLFNKVTLADAGFMKQYGECLGDINARDLICAQKFNGLTVLPPLLTDDMIAAYTAALVSGTATAGWTFGAGAALQIPFAMQMAYRFNGIGVTQNVLYENQKQIANQFNKAISQIQESLTTTSTALGKLQDVVNQNAQALNTLVKQLSSNFGAISSVLNDILSRLDPPEAEVQIDRLITGRLQSLQTYVTQQLIRAAEIRASANLAATKMSECVLGQSKRVDFCGKGYHLMSFPQAAPHGVVFLHVTYVPSQERNFTTAPAICHEGKAYFPREGVFVFNGTSWFITQRNFFSPQIITTDNTFVSGNCDVVIGIINNTVYDPLQSELDSIKEELDKIHKNGSGGSGDIIKLLNEQVNKEMQSSNLYMSMSSWCYTHSLDGAGLFLFDHAAEEYEHAKKLIIFLNENNVPVQLTSISAPEHKFEGLTQIFQKAYEHEQHISESINNIVDHAIKSKDHATFNFLQWYVAEQHEEEVLFKDILDKIELIGNENHGLYLADQYVKGIAKSRKSGS

SEQ ID NO: 533 - protein, 1327 aa, synthetic construct; identical to SEQ ID NO: 481

SEQ ID NO: 534 - protein, 1426 aa, synthetic construct
MDSKGSSQKGSRLLLLLVVSNLLLPQGVVGQYVDVGPDSVKSACIEVDIQQTFFDKTWPRPIDVSKADGIIYPQGRTYSNITITYQGLFPYQGDHGDMYVYSAGHATGTTPQKLFVANYSQDVKQFANGFVVRIGAAANSTGTVIISPSTSATIRKIYPAFMLGSSVGNFSDGKMGRFFNHTLVLLPDGCGTLLRAFYCILEPRSGNHCPAGNSYTSFATYHTPATDCSDGNYNRNASLNSFKEYFNLRNCTFMYTYNITEDEILEWFGITQTAQGVHLFSSRYVDLYGGNMFQFATLPVYDTIKYYSIIPHSIRSIQSDRKAWAAFYVYKLQPLTFLLDFSVDGYIRRAIDCGFNDLSQLHCSYESFDVESGVYSVSSFEAKPSGSVVEQAEGVECDFSPLLSGTPPQVYNFKRLVFTNCNYNLTKLLSLFSVNDFTCSQISPAAIASNCYSSLILDYFSYPLSMKSDLSVSSAGPISQFNYKQSFSNPTCLILATVPHNLTTITKPLKYSYINKCSRFLSDDRTEVPQLVNANQYSPCVSIVPSTVWEDGDYYRKQLSPLEGGGWLVASGSTVAMTEQLQMGFGITVQYGTDTNSVCPKLEFANDTKIASQLGNCVEYSLYGVSGRGVFQNCTAVGVRQQRFVYDAYQNLVGYYSDDGNYYCLRACVSVPVSVIYDKETKTHATLFGSVACEHISSTMSQYSRSTRSMLKRRDSTYGPLQTPVGCVLGLVNSSLFVEDCKLPLGQSLCALPDTPSTLTPASVGSVPGEMRLASIAFNHPIQVDQLNSSYFKLSIPTNFSFGVTQEYIQTTIQKVTVDCKQYVCNGFQKCEQLLREYGQFCSKINQALHGANLRQDDSVRNLFASVKSSQSSPIIPGFGGDFNLTLLEPVSISTGSRSARSAIEDLLFDKVTIADPGYMQGYDDCMQQGPASARDLICAQYVAGYKVLPPLMDVNMEAAYTSSLLGSIAGVGWTAGLSSFAAIPFAQSIFYRLNGVGITQQVLSENQKLIANKFNQALGAMQTGFTTTNEAFHKVQDAVNNNAQALSKLASELSNTFGAISASIGDIIQRLDPPEQDAQIDRLINGRLTTLNAFVAQQLVRSESAALSAQLAKDKVNECVKAQSKRSGFCGQGTHIVSFVVNAPNGLYFMHVGYYPSNHIEVVSAYGLCDAANPTNCIAPVNGYFIKTNNTRIVDEWSYTGSSFYAPEPITSLNTKYVAPQVTYQNISTNLPPPLLGNSTGIDFQDELDEIHKQGSGGSGDIIKLLNEQVNKEMQSSNLYMSMSSWCYTHSLDGAGLFLFDHAAEEYEHAKKLIIFLNENNVPVQLTSISAPEHKFEGLTQIFQKAYEHEQHISESINNIVDHAIKSKDHATFNFLQWYVAEQHEEEVLFKDILDKIELIGNENHGLYLADQYVKGIAKSRKSGS

SEQ ID NO: 535 - protein, 1302 aa, synthetic construct; identical to SEQ ID NO: 482

SEQ ID NO: 536 - protein, 1292 aa, synthetic construct
MDSKGSSQKGSRLLLLLVVSNLLLPQGVVGQSSQCVNLTTRTQLPPAYTNSFTRGVYYPDKVFRSSVLHSTQDLFLPFFSNVTWFHAIHVSGTNGTKRFDNPVLPFNDGVYFASTEKSNIIRGWIFGTTLDSKTQSLLIVNNATNVVIKVCEFQFCNDPFLGVYYHKNNKSWMESEFRVYSSANNCTFEYVSQPFLMDLEGKQGNFKNLREFVFKNIDGYFKIYSKHTPINLVRDLPQGFSALEPLVDLPIGINITRFQTLLALHRSYLTPGDSSSGWTAGAAAYYVGYLQPRTFLLKYNENGTITDAVDCALDPLSETKCTLKSFTVEKGIYQTSNFRVQPTESIVRFPNITNLCPFGEVFNATRFASVYAWNRKRISNCVADYSVLYNSASFSTFKCYGVSPTKLNDLCFTNVYADSFVIRGDEVRQIAPGQTGKIADYNYKLPDDFTGCVIAWNSNNLDSKVGGNYNYLYRLFRKSNLKPFERDISTEIYQAGSTPCNGVEGFNCYFPLQSYGFQPTNGVGYQPYRVVVLSFELLHAPATVCGPKKSTNLVKNKCVNFNFNGLTGTGVLTESNKKFLPFQQFGRDIADTTDAVRDPQTLEILDITPCSFGGVSVITPGTNTSNQVAVLYQDVNCTEVPVAIHADQLTPTWRVYSTGSNVFQTRAGCLIGAEHVNNSYECDIPIGAGICASYQTQTNSPRRARSVASQSIIAYTMSLGAENSVAYSNNSIAIPTNFTISVTTEILPVSMTKTSVDCTMYICGDSTECSNLLLQYGSFCTQLNRALTGIAVEQDKNTQEVFAQVKQIYKTPPIKDFGGFNFSQILPDPSKPSKRSFIEDLLFNKVTLADAGFIKQYGDCLGDIAARDLICAQKFNGLTVLPPLLTDEMIAQYTSALLAGTITSGWTFGAGAALQIPFAMQMAYRFNGIGVTQNVLYENQKLIANQFNSAIGKIQDSLSSTASALGKLQDVVNQNAQALNTLVKQLSSNFGAISSVLNDILSRLDPPEAEVQIDRLITGRLQSLQTYVTQQLIRAAEIRASANLAATKMSECVLGQSKRVDFCGKGYHLMSFPQSAPHGVVFLHVTYVPAQEKNFTTAPAICHDGKAHFPREGVFVSNGTHWFVTQRNFYEPQIITTDNTFVSGNCDVVIGIVNNTVYDPLQPELDSFKEELDKYFKNHTSPDVDLGDISGINASVVNIQKEIDRLNEVAKNLNESLIDLQELGKYEQYIKWPWYIWLGFIAGLIAIVMVTIMLCCMTSCCSCLKGCCSCGSCCKFDEDDSEPVLKGVKLHY

SEQ ID NO: 537 - protein, 1289 aa, synthetic construct
MDSKGSSQKGSRLLLLLVVSNLLLPQGVVGQSSQCVNFTTRTQLPPAYTNSFTRGVYYPDKVFRSSVLHSTQDLFLPFFSNVTWFHAIHVSGTNGTKRFANPVLPFNDGVYFASTEKSNIIRGWIFGTTLDSKTQSLLIVNNATNVVIKVCEFQFCNDPFLGVYYHKNNKSWMESEFRVYSSANNCTFEYVSQPFLMDLEGKQGNFKNLREFVFKNIDGYFKIYSKHTPINLVRGLPQGFSALEPLVDLPIGINITRFQTLHISYLTPGDSSSGWTAGAAAYYVGYLQPRTFLLKYNENGTITDAVDCALDPLSETKCTLKSFTVEKGIYQTSNFRVQPTESIVRFPNITNLCPFGEVFNATRFASVYAWNRKRISNCVADYSVLYNSASFSTFKCYGVSPTKLNDLCFTNVYADSFVIRGDEVRQIAPGQTGNIADYNYKLPDDFTGCVIAWNSNNLDSKVGGNYNYLYRLFRKSNLKPFERDISTEIYQAGSTPCNGVKGFNCYFPLQSYGFQPTYGVGYQPYRVVVLSFELLHAPATVCGPKKSTNLVKNKCVNFNFNGLTGTGVLTESNKKFLPFQQFGRDIADTTDAVRDPQTLEILDITPCSFGGVSVITPGTNTSNQVAVLYQGVNCTEVPVAIHADQLTPTWRVYSTGSNVFQTRAGCLIGAEHVNNSYECDIPIGAGICASYQTQTNSPRRARSVASQSIIAYTMSLGVENSVAYSNNSIAIPTNFTISVTTEILPVSMTKTSVDCTMYICGDSTECSNLLLQYGSFCTQLNRALTGIAVEQDKNTQEVFAQVKQIYKTPPIKDFGGFNFSQILPDPSKPSKRSFIEDLLFNKVTLADAGFIKQYGDCLGDIAARDLICAQKFNGLTVLPPLLTDEMIAQYTSALLAGTITSGWTFGAGAALQIPFAMQMAYRFNGIGVTQNVLYENQKLIANQFNSAIGKIQDSLSSTASALGKLQDVVNQNAQALNTLVKQLSSNFGAISSVLNDILSRLDPPEAEVQIDRLITGRLQSLQTYVTQQLIRAAEIRASANLAATKMSECVLGQSKRVDFCGKGYHLMSFPQSAPHGVVFLHVTYVPAQEKNFTTAPAICHDGKAHFPREGVFVSNGTHWFVTQRNFYEPQIITTDNTFVSGNCDVVIGIVNNTVYDPLQPELDSFKEELDKYFKNHTSPDVDLGDISGINASVVNIQKEIDRLNEVAKNLNESLIDLQELGKYEQYIKWPWYIWLGFIAGLIAIVMVTIMLCCMTSCCSCLKGCCSCGSCCKFDEDDSEPVLKGVKLHY

SEQ ID NO: 538 - protein, 1287 aa, synthetic construct; identical to SEQ ID NO: 510

SEQ ID NO: 539 - protein, 1272 aa, synthetic construct
MDSKGSSQKGSRLLLLLVVSNLLLPQGVVGQSDLDRCTTFDDVQAPNYTQHTSSMRGVYYPDEIFRSDTLYLTQDLFLPFYSNVTGFHTINHTFGNPVIPFKDGIYFAATEKSNVVRGWVFGSTMNNKSQSVIIINNSTNVVIRACNFELCDNPFFAVSKPMGTQTHTMIFDNAFNCTFEYISDAFSLDVSEKSGNFKHLREFVFKNKDGFLYVYKGYQPIDVVRDLPSGFNTLKPIFKLPLGINITNFRAILTAFSPAQDIWGTSAAAYFVGYLKPTTFMLKYDENGTITDAVDCSQNPLAELKCSVKSFEIDKGIYQTSNFRVVPSGDVVRFPNITNLCPFGEVFNATKFPSVYAWERKKISNCVADYSVLYNSTFFSTFKCYGVSATKLNDLCFSNVYADSFVVKGDDVRQIAPGQTGVIADYNYKLPDDFMGCVLAWNTRNIDATSTGNYNYKYRYLRHGKLRPFERDISNVPFSPDGKPCTPPALNCYWPLNDYGFYTTTGIGYQPYRVVVLSFELLNAPATVCGPKLSTDLIKNQCVNFNFNGLTGTGVLTPSSKRFQPFQQFGRDVSDFTDSVRDPKTSEILDISPCAFGGVSVITPGTNASSEVAVLYQDVNCTDVSTAIHADQLTPAWRIYSTGNNVFQTQAGCLIGAEHVDTSYECDIPIGAGICASYHTVSLLRSTSQKSIVAYTMSLGADSSIAYSNNTIAIPTNFSISITTEVMPVSMAKTSVDCNMYICGDSTECANLLLQYGSFCTQLNRALSGIAAEQDRNTREVFAQVKQMYKTPTLKYFGGFNFSQILPDPLKPTKRSFIEDLLFNKVTLADAGFMKQYGECLGDINARDLICAQKFNGLTVLPPLLTDDMIAAYTAALVSGTATAGWTFGAGAALQIPFAMQMAYRFNGIGVTQNVLYENQKQIANQFNKAISQIQESLTTTSTALGKLQDVVNQNAQALNTLVKQLSSNFGAISSVLNDILSRLDPPEAEVQIDRLITGRLQSLQTYVTQQLIRAAEIRASANLAATKMSECVLGQSKRVDFCGKGYHLMSFPQAAPHGVVFLHVTYVPSQERNFTTAPAICHEGKAYFPREGVFVFNGTSWFITQRNFFSPQIITTDNTFVSGNCDVVIGIINNTVYDPLQPELDSFKEELDKYFKNHTSPDVDLGDISGINASVVNIQKEIDRLNEVAKNLNESLIDLQELGKYEQYIKWPWYVWLGFIAGLIAIVMVTILLCCMTSCCSCLKGACSCGSCCKFDEDDSEPVLKGVKLHY

SEQ ID NO: 540 - protein, 1268 aa, synthetic construct; identical to SEQ ID NO: 499

SEQ ID NO: 541 - protein, 1245 aa, synthetic construct; identical to SEQ ID NO: 500

SEQ ID NO: 542 - protein, 1366 aa, synthetic construct
MDSKGSSQKGSRLLLLLVVSNLLLPQGVVGQYVDVGPDSVKSACIEVDIQQTFFDKTWPRPIDVSKADGIIYPQGRTYSNITITYQGLFPYQGDHGDMYVYSAGHATGTTPQKLFVANYSQDVKQFANGFVVRIGAAANSTGTVIISPSTSATIRKIYPAFMLGSSVGNFSDGKMGRFFNHTLVLLPDGCGTLLRAFYCILEPRSGNHCPAGNSYTSFATYHTPATDCSDGNYNRNASLNSFKEYFNLRNCTFMYTYNITEDEILEWFGITQTAQGVHLFSSRYVDLYGGNMFQFATLPVYDTIKYYSIIPHSIRSIQSDRKAWAAFYVYKLQPLTFLLDFSVDGYIRRAIDCGFNDLSQLHCSYESFDVESGVYSVSSFEAKPSGSVVEQAEGVECDFSPLLSGTPPQVYNFKRLVFTNCNYNLTKLLSLFSVNDFTCSQISPAAIASNCYSSLILDYFSYPLSMKSDLSVSSAGPISQFNYKQSFSNPTCLILATVPHNLTTITKPLKYSYINKCSRFLSDDRTEVPQLVNANQYSPCVSIVPSTVWEDGDYYRKQLSPLEGGGWLVASGSTVAMTEQLQMGFGITVQYGTDTNSVCPKLEFANDTKIASQLGNCVEYSLYGVSGRGVFQNCTAVGVRQQRFVYDAYQNLVGYYSDDGNYYCLRACVSVPVSVIYDKETKTHATLFGSVACEHISSTMSQYSRSTRSMLKRRDSTYGPLQTPVGCVLGLVNSSLFVEDCKLPLGQSLCALPDTPSTLTPRSVRSVPGEMRLASIAFNHPIQVDQLNSSYFKLSIPTNFSFGVTQEYIQTTIQKVTVDCKQYVCNGFQKCEQLLREYGQFCSKINQALHGANLRQDDSVRNLFASVKSSQSSPIIPGFGGDFNLTLLEPVSISTGSRSARSAIEDLLFDKVTIADPGYMQGYDDCMQQGPASARDLICAQYVAGYKVLPPLMDVNMEAAYTSSLLGSIAGVGWTAGLSSFAAIPFAQSIFYRLNGVGITQQVLSENQKLIANKFNQALGAMQTGFTTTNEAFHKVQDAVNNNAQALSKLASELSNTFGAISASIGDIIQRLDPPEQDAQIDRLINGRLTTLNAFVAQQLVRSESAALSAQLAKDKVNECVKAQSKRSGFCGQGTHIVSFVVNAPNGLYFMHVGYYPSNHIEVVSAYGLCDAANPTNCIAPVNGYFIKTNNTRIVDEWSYTGSSFYAPEPITSLNTKYVAPQVTYQNISTNLPPPLLGNSTGIDFQDELDEFFKNVSTSIPNFGSLTQINTTLLDLTYEMLSLQQVVKALNESYIDLKELGNYTYYNKWPWYIWLGFIAGLVALALCVFFILCCTGCGTNCMGKLKCNRCCDRYEEYDLEPHKVHV

SEQ ID NO: 543 - protein, 1269 aa, synthetic construct
MFVFLVLLPLVSSQCVNLITRTQSYTNSFTRGVYYPDKVFRSSVLHSTQDLFLPFFSNVTWFHAIHVSGTNGTKRFDNPALPFNDGVYFASTEKSNIIRGWIFGTTLDSKTQSLLIVNNATNVVIKVCEFQFCNDPFLDVYQKNNKSWMESEFRVYSSANNCTFEYVSQPFLMDLEGKEGNFKNLREFVFKNIDGYFKIYSKHTPINLERDLPQGFSALEPLVDLPIGINITRFQTLLALHRSYLTPVDSSSGWTAGAAAYYVGYLQPRTFLLKYNENGTITDAVDCALDPLSETKCTLKSFTVEKGIYQTSNFRVQPTESIVRFPNITNLCPFHEVFNATTFASVYAWNRKRISNCVADYSVIYNFAPFFAFKCYGVSPTKLNDLCFTNVYADSFVIRGNEVSQIAPGQTGNIADYNYKLPDDFTGCVIAWNSNKLDSKPSGNYNYLYRLFRKSKLKPFERDISTEIYQAGNKPCNGVAGPNCYSPLQSYGFRPTYGVGHQPYRVVVLSFELLHAPATVCGPKKSTNLVKNKCVNFNFNGLTGTGVLTESNKKFLPFQQFGRDIADTTDAVRDPQTLEILDITPCSFGGVSVITPGTNTSNQVAVLYQGVNCTEVPVAIHADQLTPTWRVYSTGSNVFQTRAGCLIGAEYVNNSYECDIPIGAGICASYQTQTKSHRRARSVASQSIIAYTMSLGAENSVAYSNNSIAIPTNFTISVTTEILPVSMTKTSVDCTMYICGDSTECSNLLLQYGSFCTQLKRALTGIAVEQDKNTQEVFAQVKQIYKTPPIKYFGGFNFSQILPDPSKPSKRSFIEDLLFNKVTLADAGFIKQYGDCLGDIAARDLICAQKFNGLTVLPPLLTDEMIAQYTSALLAGTITSGWTFGAGAALQIPFAMQMAYRFNGIGVTQNVLYENQKLIANQFNSAIGKIQDSLSSTASALGKLQDVVNHNAQALNTLVKQLSSKFGAISSVLNDILSRLDPPEAEVQIDRLITGRLQSLQTYVTQQLIRAAEIRASANLAATKMSECVLGQSKRVDFCGKGYHLMSFPQSAPHGVVFLHVTYVPAQEKNFTTAPAICHDGKAHFPREGVFVSNGTHWFVTQRNFYEPQIITTDNTFVSGNCDVVIGIVNNTVYDPLQPELDSFKEELDKYFKNHTSPDVDLGDISGINASVVNIQKEIDRLNEVAKNLNESLIDLQELGKYEQYIKWPWYIWLGFIAGLIAIVMVTIMLCCMTSCCSCLKGCCSCGSCCKFDEDDSEPVLKGVKLHYT

SEQ ID NO: 544 - protein, 609 aa, synthetic construct; identical to SEQ ID NO: 487

SEQ ID NO: 545 - protein, 609 aa, synthetic construct; identical to SEQ ID NO: 488

SEQ ID NO: 546 - protein, 611 aa, synthetic construct; identical to SEQ ID NO: 503

SEQ ID NO: 547 - protein, 611 aa, synthetic construct; identical to SEQ ID NO: 504

SEQ ID NO: 548 - protein, 1735 aa, synthetic construct; identical to SEQ ID NO: 501

SEQ ID NO: 549 - protein, 1732 aa, synthetic construct; identical to SEQ ID NO: 496

SEQ ID NO: 550 - protein, 1732 aa, synthetic construct; identical to SEQ ID NO: 493

SEQ ID NO: 551 - protein, 1344 aa, synthetic construct
MDSKGSSQKGSRLLLLLVVSNLLLPQGVVGSSQCVNLITRTQSYTNSFTRGVYYPDKVFRSSVLHSTQDLFLPFFSNVTWFHAIHVSGTNGTKRFDNPALPFNDGVYFASTEKSNIIRGWIFGTTLDSKTQSLLIVNNATNVVIKVCEFQFCNDPFLDVYQKNNKSWMESEFRVYSSANNCTFEYVSQPFLMDLEGKEGNFKNLREFVFKNIDGYFKIYSKHTPINLERDLPQGFSALEPLVDLPIGINITRFQTLLALHRSYLTPVDSSSGWTAGAAAYYVGYLQPRTFLLKYNENGTITDAVDCALDPLSETKCTLKSFTVEKGIYQTSNFRVQPTESIVRFPNITNLCPFHEVFNATTFASVYAWNRKRISNCVADYSVIYNFAPFFAFKCYGVSPTKLNDLCFTNVYADSFVIRGNEVSQIAPGQTGNIADYNYKLPDDFTGCVIAWNSNKLDSKPSGNYNYLYRLFRKSKLKPFERDISTEIYQAGNKPCNGVAGPNCYSPLQSYGFRPTYGVGHQPYRVVVLSFELLHAPATVCGPKKSTNLVKNKCVNFNFNGLTGTGVLTESNKKFLPFQQFGRDIADTTDAVRDPQTLEILDITPCSFGGVSVITPGTNTSNQVAVLYQGVNCTEVPVAIHADQLTPTWRVYSTGSNVFQTRAGCLIGAEYVNNSYECDIPIGAGICASYQTQTKSPGSASSVASQSIIAYTMSLGAENSVAYSNNSIAIPTNFTISVTTEILPVSMTKTSVDCTMYICGDSTECSNLLLQYGSFCTQLKRALTGIAVEQDKNTQEVFAQVKQIYKTPPIKYFGGFNFSQILPDPSKPSKRSFIEDLLFNKVTLADAGFIKQYGDCLGDIAARDLICAQKFNGLTVLPPLLTDEMIAQYTSALLAGTITSGWTFGAGAALQIPFAMQMAYRFNGIGVTQNVLYENQKLIANQFNSAIGKIQDSLSSTASALGKLQDVVNHNAQALNTLVKQLSSKFGAISSVLNDILSRLDPPEAEVQIDRLITGRLQSLQTYVTQQLIRAAEIRASANLAATKMSECVLGQSKRVDFCGKGYHLMSFPQSAPHGVVFLHVTYVPAQEKNFTTAPAICHDGKAHFPREGVFVSNGTHWFVTQRNFYEPQIITTDNTFVSGNCDVVIGIVNNTVYDPLQSELDSIKEELDKIHKNGSGGSGDIIKLLNEQVNKEMQSSNLYMSMSSWCYTHSLDGAGLFLFDHAAEEYEHAKKLIIFLNENNVPVQLTSISAPEHKFEGLTQIFQKAYEHEQHISESINNIVDHAIKSKDHATFNFLQWYVAEQHEEEVLFKDILDKIELIGNENHGLYLADQYVKGIAKSRKSGS

SEQ ID NO: 552 - DNA, 621 bp, synthetic construct
  source 1..621: mol_type = other DNA
atggactccaaagggtctagccagaaggggtcccgcctcctgctgctgctggtggtgagcaacctgctgctccctcagggcgtggtgggacaggagtcccaggtgagacagcagtttagcaaggatatcgagaagctgctgaatgagcaggtcaacaaagagatgcagtctagcaacctgtacatgagcatgagctcctggtgctatacccacagcctcgacggcgctggcctgttcctgttcgaccacgcagccgaggagtacgagcatgccaagaagctgattattttcctgaatgagaacaacgtgccagtccagctgacatccatttccgctcccgaacacaagttcgagggcctgacccagatcttccagaaggcatacgagcacgagcagcacatctccgaaagcatcaataatatcgtggatcacgccatcaagtccaaagatcacgccacctttaacttcctgcagtggtacgtggccgagcagcacgaggaggaggtgctgttcaaagatattctggacaagatcgagctgatcggcaatgaaaaccatggcctgtatctggccgatcagtacgtgaagggaattgcaaaatccagaaaaagtggctcctaa

SEQ ID NO: 553 - DNA, 1230 bp, synthetic construct
  source 1..1230: mol_type = other DNA
atggacagcaagggatctagccagaagggcagccggctgctgctgctgctggtggtgagcaacctgctgctgcctcagggcgtggtgggccaaaacatcaccaacctgtgccctttcggcgaagtgttcaatgccaccagattcgcctccgtgtacgcctggaaccggaagcggatcagcaattgcgtggccgactactctgtgctgtacaatagcgcctctttcagcaccttcaagtgctacggcgtgagccccaccaagctgaacgacctgtgcttcaccaacgtgtacgccgacagcttcgtgatccggggcgacgaggtgcggcagattgcccctggccagacaggaaagatcgctgactacaattacaagctgcccgacgattttaccggctgcgtgatcgcctggaacagcaataacctggactccaaggtgggcggcaactacaattacctgcggagactgttcagaaagagcaacctgaagcccttcgagagagacatctccaccgagatctaccaggccggcagcaccccctgcaatggcgtggagggcttcaattgttacttccccctgcagagctatggcttccagcctaccaacggcgtgggctaccagccctacagagtggtggtgctgagcttcgagaacaagagcgcccccgccacagtgtgtggaggcggctctggcggctccggcgagagccaggtgagacagcagttcagcaaggacatcgagaagctgctgaatgaacaggtgaataaggaaatgcagagctctaacctgtacatgagcatgagctcttggtgctacacccactccctggatggcgccggcctgttcctgtttgaccacgccgccgaggagtacgagcacgctaagaagctgatcatcttcctgaatgagaataacgtgcctgtgcagctgaccagcatcagcgcccccgagcacaaattcgagggcctgacccagatcttccagaaggcctacgagcacgagcagcacatctccgagagcatcaataacatcgtggaccacgccatcaagagcaaggaccacgccaccttcaatttcctgcagtggtacgtggccgagcagcacgaggaggaggtgctgtttaaggacatcctggacaagattgaactgatcggcaatgagaatcacggcctgtacctggccgaccagtacgtgaagggcatcgccaaaagcagaaagagcggctcttaa

SEQ ID NO: 554 - DNA, 1230 bp, synthetic construct
  source 1..1230: mol_type = other DNA
atggatagcaaaggcagcagccagaaggggagcagactgctgctgctgctggtggtgtctaacctgctgctgcctcagggcgtggtgggccagaatattaccaacctgtgcccattcggcgaggtgttcaatgccacccggttcgcctccgtgtacgcctggaatcggaagagaatctccaactgcgtggccgactactccgtgctgtacaatagcgccagcttcagcaccttcaagtgctacggcgtgtcccccaccaagctgaatgacctgtgcttcaccaacgtgtacgccgacagcttcgtgatcagaggcgacgaggtgagacagatcgcccctggccagaccggcaatatcgccgactacaattacaagctgcccgacgacttcaccggctgcgtgatcgcctggaacagcaataatctggactccaaggtgggcggcaattacaattacctgagacggctgttcagaaagagcaacctgaagcccttcgagagagacatcagcaccgagatctaccaggccggcagcaccccctgcaacggcgtgaagggcttcaattgctacttccctctgcagagctacggcttccagcccacctacggcgtgggctaccagccttacagagtggtggtgctgagcttcgagaataagagcgcccccgccaccgtgtgcggcggaggcagcggcggcagcggcgagagccaggtgagacagcagttctccaaggacatcgaaaagctgctgaacgagcaggtgaacaaggagatgcagagcagcaacctgtacatgagcatgagctcctggtgctacacccatagcctggacggcgccggcctgttcctgttcgaccacgccgccgaggagtacgagcacgccaagaagctgatcatcttcctgaatgaaaataacgtgcccgtgcagctgaccagcatcagcgcccccgagcacaagttcgagggcctgacccagatcttccagaaggcctacgagcacgagcagcacatcagcgagagcatcaataatatcgtggaccacgccatcaagagcaaggatcacgccaccttcaactttctgcagtggtacgtggccgagcagcacgaggaggaggtgctgttcaaggacatcctggacaagatcgagctgatcggcaacgagaaccacggcctgtacctggccgatcagtacgtgaagggcatcgccaagtccagaaagagcggcagctaa

SEQ ID NO: 555 - DNA, 1230 bp, synthetic construct
  source 1..1230: mol_type = other DNA
atggactctaagggcagcagccagaaaggcagcaggctgctgctgctgctcgtggtcagcaacctgctgctgccccagggcgttgtgggccagaacatcaccaacctttgcccatttgacgaggtgtttaacgccactactttcgctagcgtctatgcctggaacagaaagaggattagcaattgcgttgcagactatagcgtgctgtataatttcgccccattctttgctttcaagtgctacggcgtctctcccaccaagctgaacgacctgtgctttacaaacgtgtatgctgacagcttcgtgatccgcggaaatgaagtgtcccagattgccccaggccagactggaaatatcgctgactacaattacaagctgcccgatgatttcactggctgcgtgattgcctggaacagtaacaagctggactccaccgtggggggaaattataattatagaaggcgcctgttcaggaagtcaaagctgaaacctttcgagagggacatctctaccgagatctaccaggctggaaacaagccctgcaatggcgtggccggcgtgaattgttatttcccactccagagctacgggttccggccaacttatggagtggggcaccaaccttacagggtggtggtgctgagcttcgaaaacaagtccgctcctgcaacagtgtgcggcggcggatccggcggcagcggcgagagccaggtcagacagcagtttagcaaggatatcgagaaactgctcaacgagcaggtgaataaggagatgcagtcttctaacctgtatatgagcatgagctcttggtgttatactcactctctggacggagctggcctgttcctgttcgaccacgccgctgaggagtacgagcacgcaaagaagctgatcatcttcctgaacgaaaacaatgttccagtgcagctgacttccattagcgcccccgagcacaagttcgagggactgacacagatttttcagaaagcctacgagcacgaacagcacatcagcgagtcaattaataacatcgtggaccatgccattaagtctaaggaccacgctacctttaacttcctgcagtggtatgtggcagaacagcacgaggaagaggtgctctttaaagatatcctggacaagatcgagctgatcggcaatgagaatcacggcctgtatctggccgatcagtacgtgaaagggattgctaagtctcgcaaatccggcagctaa

SEQ ID NO: 556 - DNA, 1227 bp, synthetic construct
  source 1..1227: mol_type = other DNA
atggattccaaaggctccagccagaagggaagcagactgctgctgctgctggtggtgtcaaacctgctcctgcctcagggagtggtggggcaaaatattaccaacctgtgtccatttggggaggtgtttaacgccaccaagttccctagcgtgtatgcctgggaaagaaaaaagatttccaactgcgtggcagactatagcgtgctgtacaattctaccttcttctctaccttcaagtgctatggcgttagcgcaactaagctgaacgacctctgcttctccaacgtgtacgccgatagtttcgtggtcaaaggcgatgatgtgcgccagatcgccccaggccagaccggagtgatcgccgactataactataagctgcctgacgactttatgggctgtgtgctggcttggaacacacggaacatcgacgccaccagcaccgggaattataactacaagagacggtatctgagacacggaaagctcagaccatttgagcgggatatcagcaacgtgccctttagtcccgacgggaagccttgcacccctcctgcactgaactgctactggcctctgaacgactacggcttctatacaaccacaggaatcggataccagccatatagggtcgtggtgctgagcttcgagaataagagtgcaccagctaccgtgtgcggcggaggaagcgggggcagcggcgaatcacaggtgaggcagcagttttccaaggacattgagaagctgctgaacgaacaggtgaacaaggagatgcagtcttctaacctgtacatgtccatgtcctcttggtgttacactcactccctggatggagccggcctgttcctctttgaccacgccgctgaggaatacgagcacgctaaaaagctgatcatcttcctgaacgagaacaatgtgccagttcagctgaccagcatctctgcacccgaacacaaatttgagggcctgacccagatcttccagaaggcctacgagcacgagcaacatatttccgagtccatcaataatatcgtggaccacgccatcaagtccaaggatcacgccacattcaacttcctgcagtggtacgtggctgagcagcacgaggaagaggtgctctttaaggacatcctggacaagattgagctcatcggaaacgaaaaccacggcctgtatctggccgaccagtatgtgaagggcattgctaagtctcggaaatccgggtcttaa

SEQ ID NO: 557 - DNA, 1221 bp, synthetic construct
  source 1..1221: mol_type = other DNA
atggacagcaagggcagcagccagaagggcagcagactgctgctgctgctggtggtgagcaacctgctgctgcctcagggcgtggtgggccagaatatgaccaatatttgcccattcgaccaggtgttcaataagacccagttccccagcgtgtacgcctgggagcgcgtgagaatcagcgactgcgtgtccgattacaccgtgctgtacaatagcagcgccagcttcagcaccttcaagtgttacggcgtgagccccacaaagctgaatgacctgtgcttcagcggcgtgtacgccgactacttcgtggtgaagggcgaccacgtgcaccagatcgcccccggccagacaggcgtgatcgccgattacaattacaagctgcccagcgagttcgtgggctgtatcctggcctggaataccagaaccatcgatagcaagcggggcttctactacagactgttcagacacggcaacatccggccctacgagagagacaccagcaatgtgccatacaatgccgccggcggcacatgcaatcagcctggcacacacaattgctacgagcccctgcaggactacggattcaccagcaccagcggcgtgggctaccagcctttcagagtggtggtgctgagcttcgagaataagtctgcccctgccaccgtgtgcggaggcggctccggaggctctggagagagccaggtgcggcagcagttcagcaaggacatcgagaagctgctgaatgaacaggtgaataaggagatgcagagcagcaacctgtacatgagcatgagcagctggtgctacacccacagcctggacggcgccggactgttcctgttcgatcacgccgccgaggaatacgagcacgccaagaagctgatcatcttcctgaatgagaacaatgtgcccgtgcagctgaccagcatctctgcccctgagcacaagttcgagggcctgacccagatcttccagaaggcctacgagcacgagcagcacatcagcgagagcattaacaatatcgtggaccacgccatcaagagcaaggaccacgccaccttcaatttcctgcagtggtacgtggccgagcagcacgaggaggaagtgctgttcaaggacatcctggacaagatcgagctgatcggcaatgagaatcacggcctgtacctggccgaccagtacgtgaaaggcatcgccaagagcagaaagagcggcagctaa

SEQ ID NO: 558 - DNA, 1173 bp, synthetic construct
  source 1..1173: mol_type = other DNA
atggattcaaaaggatccagccagaaaggatcccgcctgctgctgctgctggtggtgagcaacctgctgctgcctcagggggtggtgggccagaacatcacgaacttctgcccatttgataaagtgttcaacgccacacgcttcccaaacgtgtacgcctggcagcgcaccaagatctccgattgcattgccgactacaccgtgctgtataactcaaccagcttttccactttcaagtgttacggagtgagccccagcaagctgatcgacctgtgtttcaccagcgtttacgctgacactttcctgattcggttctctgaggtccgccagatcgcccccggggaaaccggagtgatcgctgactataactacaagctgccagatgacttcaccggatgtgtgctggcttggaatactgctcagcaggacattggcagctacttctatcggtcccacagagccgtgaagctgaagcccttcgagagggacctgtcttctgacgagaacggggtgaggaccctgtccacctacgactttaatcctaacgtgcctctcgactaccaggccacccgcgtggtggtgctgagcttcgagaacaagtctgccccagccactgtgtgtggagggggatcagggggatctggcgagagccaggtgagacagcaattctccaaggatattgagaagctgctcaacgagcaggtgaacaaggaaatgcagtcaagcaacctgtatatgagcatgagcagttggtgctacacacattctctggacggggccggcctgttcctgttcgaccacgccgccgaggaatacgagcacgccaagaagctgattatctttctgaacgagaacaacgtcccagtgcagctgaccagcatcagcgcccccgaacataaattcgagggcctgactcagatttttcagaaggcttatgagcacgagcagcatatcagcgagtctatcaacaacatcgtggaccacgccatcaagagcaaggatcacgcaaccttcaacttcctgcagtggtatgtggcagaacagcatgaggaagaggtgctgttcaaggatatcctggacaagatcgagctgatcggcaacgagaaccacggactgtatctggcagaccagtatgtgaaaggaatcgccaagagcagaaagagtggctcctaa

SEQ ID NO: 559 - DNA, 1266 bp, synthetic construct
  source 1..1266: mol_type = other DNA
atggatagcaagggctccagccagaagggcagccggctgctgctgctgctggtggtgagcaacctgctgctgcctcagggcgtggtgggccaggagggagtggagtgcgacttcagccctctgctgagcggaaccccaccacaggtgtacaatttcaagagactggtgttcaccaattgcaattacaatctgaccaagctgctgagcctgttcagcgtgaatgacttcacctgcagccagatcagccctgccgccatcgccagcaattgctacagcagcctgattctggactacttcagctaccccctgagcatgaaatccgacctgtctgtgagcagcgccggccctatcagccagttcaattacaaacagagcttcagcaaccctacctgcctgatcctggccaccgtgcctcacaacctgaccaccatcaccaagcctctgaagtatagctacatcaacaagtgcagccggctgctgtccgatgaccggaccgaggtgccccagctggtgaatgccaatcagtactccccctgcgtgagcatcgtgccatccaccgtggccgaggatggcgactactaccggaagcagctgagccccctggaaggaggcggctggctggtggcctctggcagcacagtggccatgaccgagcagctgcagatgggcttcggcatcaccgtgcagaatggcacagataccaatagcgtgtgcggcggcggctctggaggcagcggcgagagccaggtgcggcagcagttcagcaaggacatcgagaagctgctgaatgagcaggtgaataaggagatgcagagctccaacctgtacatgagcatgagctcctggtgctacacccactccctggatggcgctggcctgttcctgtttgaccacgccgccgaggagtacgaacacgccaagaagctgatcatcttcctgaatgagaataacgtgcctgtgcagctgaccagcatcagcgcccccgagcacaagttcgagggcctgacacagatcttccagaaggcctacgaacatgagcagcacatcagcgagagcatcaataatatcgtggaccacgccatcaagtccaaggaccacgccaccttcaactttctgcagtggtacgtggccgagcagcacgaggaggaggtgctgttcaaggacatcctggataagatcgagctgattggcaatgagaaccacggcctgtacctggctgatcagtacgtgaagggcatcgccaagagccggaagtccggcagctaa

SEQ ID NO: 560 - DNA, 4050 bp, synthetic construct
  source 1..4050: mol_type = other DNA
atggacagcaagggaagctcccagaaaggatctcgactgctgctgctgctggtggtgtccaacctgctgctgccacagggcgtcgtgggccaaagcagccagtgtgtgaacctcactactagaacccagctgcccccagcctacaccaattcctttacaaggggggtgtactatcccgataaggtgttcagaagctctgtgctgcattctacacaggacctctttctgccctttttcagcaacgtgacatggtttcacgccatccacgtgagcgggacaaatgggacaaaaaggtttgataaccccgtgctgccgtttaacgacggggtgtatttcgcaagcaccgagaagagtaacattatccggggatggatcttcggaactacactggactccaagacacagtctctgctgatcgtgaacaatgcaacaaacgtggtcattaaggtgtgcgagttccagttctgcaacgatccattcctgggagtgtattaccataagaacaacaagagctggatggagtcagagttcagggtgtactccagcgccaacaattgtacttttgagtatgtgtctcagccattcctgatggacctggagggcaaacagggcaacttcaaaaatctgagggagttcgtgtttaagaacatcgatgggtatttcaaaatctactccaagcacacacctattaacctggtgcgcgatctgcctcagggcttttccgctctggagccactggtggacctgccaatcggaattaacattaccagattccagactctgctggccctccaccggagctacctcacaccaggagacagctccagtggctggaccgccggagccgctgcctactatgtgggctatctgcagcctagaactttcctgctgaagtataatgaaaatggcacaatcaccgacgcagtcgattgcgctctggatcctctgtctgagactaagtgcaccctgaagtccttcaccgtcgaaaagggcatctatcagacaagcaatttccgggtgcagcccacagagagcatcgtgagattccccaatatcactaacctgtgcccattcggcgaggtgtttaacgctacccgcttcgcctccgtctacgcatggaacagaaaaaggatttctaactgtgtggctgactactctgtgctgtataattctgcttccttctcaacctttaaatgctacggggtgagccccaccaaactgaacgacctgtgtttcaccaacgtgtatgctgatagcttcgtgatcaggggagatgaggttcggcagatcgcaccaggccagacaggcaaaatcgccgattacaattacaagctgcccgatgactttaccggctgtgtgatcgcatggaacagcaacaacctggacagcaaggtgggcggcaattacaattacctgtatcgcctgtttaggaagtccaacctgaagccttttgagcgggacatctctactgagatctatcaagccgggagcactccatgtaacggcgtggaggggttcaattgttatttccctctgcagagctatggcttccagccaactaacggggtgggctaccagccctatcgggtcgtggtgctgagcttcgaactgctgcacgctccagccacagtctgcggacccaagaagtccacaaatctcgtgaaaaataagtgcgtgaacttcaatttcaacggactgaccggaacaggcgtgctgactgagagcaacaagaagttcctgccatttcagcagttcggccgggatatcgcagataccaccgacgccgtccgcgaccctcagacactggaaatcctggatattaccccatgcagcttcggaggcgtgtctgtcattacaccaggcacaaacacatccaaccaggtggccgtgctgtatcaggatgtcaactgcacagaggtgcccgtggccatccacgccgaccagctgacacccacctggagagtgtactctacaggatcaaacgtctttcagacccgggcaggatgtctgattggggcagagcatgtgaacaactcctatgagtgcgacattccaatcggggctgggatctgcgcttcctatcagactcagacaaattccccaggctccgccagcagcgtggcctctcagagcattatcgcatataccatgtctctgggggccgagaacagcgtggcctactctaataatagcatcgccattccaactaactttactattagcgtcaccacagagattctgcccgtgagcatgacaaaaacctctgtggattgcactatgtatatttgcggggactccacagagtgctccaacctgctgctgcagtacggctccttttgcacccagctgaaccgcgcactgacaggaattgctgtggagcaggataagaatacccaggaggtcttcgctcaggtgaagcagatctacaagactccacccatcaaggacttcggcggatttaatttctcccagatcctgccagatccttccaagcccagcaagcgcagctttatcgaggacctgctctttaataaggtgaccctggcagacgctggattcatcaagcagtatggagattgcctgggggacatcgcagcccgggacctgatttgtgctcagaagtttaacggactgacagtgctgccacctctgctgacagacgagatgatcgcccagtatacttccgccctcctggccggtacaattacaagcggctggaccttcggggccggagctgcactgcagatcccctttgctatgcagatggcctatagattcaacggaatcggcgttactcagaacgtgctgtacgagaaccagaagctgatcgccaaccagttcaatagcgccatcggaaagattcaggacagcctgagctccacagctagcgctctgggcaaactgcaggacgttgtcaatcagaacgcccaggccctcaacaccctggtgaaacagctgtctagtaactttggcgccattagcagcgtgctgaatgacatcctctcccgcctggatcctcccgaggccgaggtgcagatcgacaggctgattacagggcggctgcagtctcttcagacctacgtgacacagcagctgatcagagctgccgagatccgggcatctgccaatctggccgccactaagatgtctgagtgcgtgctgggacagtctaaacgggtggatttctgtggcaaggggtaccacctgatgtctttcccccagtcagccccccacggagtggtgttcctgcacgtgacatatgtccctgcccaggaaaagaatttcaccaccgccccagcaatttgccacgacgggaaagcacactttcctcgggagggcgtgtttgtgtcaaatgggacccactggtttgtgacccagagaaatttttacgagccccagatcattaccactgacaatacattcgtgagcggcaactgcgacgtggtgatcggcattgtgaataatacagtgtatgaccccctgcagagcgagctggacagcatcaaagaggaacttgataaaatccataaaaatggcagcggcgggagcggcgacattatcaagctgctgaacgagcaggtgaacaaggaaatgcagtcctccaacctgtatatgtccatgagcagctggtgttacacacattctctggatggggcaggcctgttcctgtttgatcacgcagccgaggagtacgaacatgctaagaagctgattattttcctgaacgaaaacaatgtgccagtgcagctgacctccatctccgcccccgagcacaagttcgagggactcactcagatcttccagaaggcctatgaacacgaacagcacatctccgagtccattaacaatatcgtggaccacgcaattaagtctaaggaccacgcaaccttcaactttctgcagtggtacgtcgctgagcagcacgaagaggaggtgctgttcaaagacatcctggataaaatcgagctgatcggaaatgagaaccatgggctgtacctggccgaccagtatgtgaaaggcattgccaaaagccgcaagagcggcagctaa

SEQ ID NO: 561 - DNA, 4041 bp, synthetic construct
  source 1..4041: mol_type = other DNA
atggattctaagggctccagccagaagggaagcaggctgctgctcctcctggtggtgtccaacctgctgctgccacagggggtggtgggacagtccagccagtgtgtcaatttcacaactagaacccagctcccccctgcctatactaactccttcactcgcggggtttattacccagacaaggtgttcaggtcctccgtgttgcattctacacaagacttgttcctgccattctttagcaatgtgacatggtttcatgccattcacgtcagcggaactaatggcacaaagcgctttgctaaccccgtgctgcccttcaacgatggggtgtacttcgccagcacagagaaaagcaatattattcgcggctggatctttgggactactctggattctaagactcagtccctgctgatcgtgaataacgctacaaacgtggtcattaaggtgtgcgagtttcagttctgcaacgatccttttctgggcgtgtattatcacaagaataacaaaagctggatggaatccgaattcagagtttactcttccgccaacaactgcaccttcgagtacgtgtcccagccctttctgatggacctggaaggaaagcagggaaacttcaaaaatctgcgggagttcgtgtttaaaaacattgatggctactttaagatctatagcaaacacactccaatcaacctggtgcggggactcccacaaggattcagcgctctggagcctctggtggatctgcctatcgggattaacatcactaggttccagactctgcacatttcctacctgacacccggcgactcttcttctggctggaccgccggggccgccgcttactacgtgggatatctccagccacgcacctttctgctgaagtataacgagaacggcaccattacagatgccgtggactgcgctctcgaccctctgtccgagacaaagtgtactctgaagtccttcaccgtggagaaaggcatttatcagacttccaatttccgcgttcagcccacagagtccatcgtccgctttcccaacattactaacctgtgcccttttggggaggtgtttaatgcaacaagattcgcaagcgtgtacgcttggaaccggaaaaggatttctaattgtgtggccgattacagcgtgctgtacaatagcgccagcttcagtactttcaagtgctacggagtcagcccaaccaaactgaacgacctctgctttaccaacgtgtacgctgactccttcgtgatccggggagacgaagtgaggcagattgcccccggacagactggcaatatcgccgactacaattacaaactccctgatgacttcacaggatgtgtgatcgcttggaacagcaacaacctggactccaaagtcggaggaaactacaattacctgtaccggctgtttagaaagtccaacctgaagccttttgagagagatatttccactgaaatctatcaggcaggaagcaccccatgtaatggggtgaagggattcaactgctacttccctctccagtcctatggctttcagccaacctatggcgtcggataccagccatatagagtggtggttctgagcttcgaactgctccacgccccagccaccgtgtgtggccccaagaagtctaccaacctggttaagaacaaatgcgtgaattttaacttcaatggactcactggcactggagtcctgacagagtctaacaagaagtttctgccattccagcagtttggcagggacattgccgacaccacagatgccgtgagggacccccagaccctggagattctggatatcactccttgcagttttggcggcgtttccgtgatcacccctggcaccaatacctctaaccaggtggcagtgctgtaccagggggtgaactgtacagaggtgcctgtggccattcatgctgaccagctgacacctacttggcgggtctattccaccggctctaacgtgtttcagactagggccgggtgtctgattggggctgaacacgttaacaacagctacgagtgtgatattccaatcggggcagggatctgcgcaagctaccagacacaaactaactctccaggctctgcttccagcgtggcttcccagtccatcatcgcctacacaatgagcctgggagtggaaaacagcgtggcctactctaataacagcatcgccattccaaccaacttcaccatcagcgtgactacagaaattctgcccgtgagcatgaccaaaacttccgtcgactgtacaatgtacatctgcggggattctacagagtgttctaacctgctcctgcagtacggctccttttgtacgcagctgaatcgggccctgacagggatcgccgtcgagcaggacaagaatacacaggaggtgttcgcccaggtgaagcagatttataagactccacccattaaggacttcggaggatttaacttctcccagattctaccagacccaagcaagccctccaagcggagcttcatcgaagacctgctgttcaacaaggtgaccctggcagatgctggctttatcaagcagtacggagattgcctgggagatatcgccgctcgggatctcatttgtgctcagaaattcaatggcctgacagtcctgcctcctctcctgaccgatgagatgatcgctcagtatacaagcgccctgctggctggaacaattacaagcggctggacattcggcgccggagccgctctgcagatcccattcgcaatgcagatggcttaccgcttcaacgggatcggcgtgactcaaaacgtgctgtatgagaaccaaaagctgatcgctaaccagtttaactccgccatcgggaaaatccaggactctctctcgtccacagcttccgccctgggcaaactgcaggatgtggtgaaccagaatgctcaggctctgaacaccctggtgaaacagctgagcagcaattttggggcaatcagctctgtgctgaatgacattttgagcagactggacccccccgaagccgaggtgcagatcgacagactgattacaggcaggcttcagtccctgcagacatatgtgacccagcagctgattcgggctgcagagatcagagcctccgcaaacctggctgccaccaaaatgtccgagtgcgtgctggggcagtccaagagagttgacttttgtgggaaggggtaccacctcatgtccttcccccagtccgcaccacacggagtggtgtttctgcacgtcacctatgtgcctgcccaggagaaaaacttcacaaccgcacctgctatttgccacgacggcaaggcccatttcccaagggaaggcgtgttcgtgtctaacggaacacactggtttgtcactcagagaaacttttacgaaccacagattatcaccactgacaatacctttgtgtccggcaattgtgatgttgtgatcggcatcgtcaataataccgtgtatgatccactgcagtccgagctggacagcatcaaggaggaactggataaaattcacaagaatggcagcggaggaagcggagatattatcaagctgctcaatgagcaagtgaataaagaaatgcagagctctaacctgtacatgtccatgagcagctggtgttatacccactccctggacggcgccggcctgttcctgttcgaccatgccgccgaagaatacgaacacgccaagaaactgatcattttcctgaacgagaacaacgtgcctgtgcagctaaccagcatctctgcccctgaacacaagtttgagggcctcactcagatctttcagaaggcatacgaacacgagcagcacattagcgagagcatcaataacattgtggaccacgctatcaagtccaaggaccacgccaccttcaacttcctccagtggtacgtggctgagcagcacgaggaggaggtgttgttcaaggatatcttggacaagatcgagctgattgggaatgagaatcacggcctgtatctggccgaccagtacgtgaaagggatcgctaaaagccggaagtcaggatcctaa

SEQ ID NO: 562 - DNA, 4035 bp, synthetic construct
  source 1..4035: mol_type = other DNA
atggactctaagggcagcagccagaaaggcagccggctgctgctgctgctggtggtgagcaatctcctgctgccccagggcgtggtgggacagtcctcccagtgcgtgaacctgatcaccagaacccagagctacaccaatagctttacccggggcgtgtactaccctgacaaggtgttccggagcagcgtgctgcacagcacccaggacctcttcctgcctttcttcagcaacgtcacctggttccacgccatctccggcaccaatggcaccaagagattcgacaatcccgtgctgccttttaacgacggcgtgtacttcgccagcaccgagaaaagcaatatcatccggggctggatcttcggcaccaccctggacagcaagacccagagcctgctgatcgtgaataacgccaccaacgtggtgatcaaggtgtgtgagttccagttctgcaatgatcccttcctggatgtgtactaccacaagaataataagagctggatggagagcgagttcagagtgtactctagcgccaataactgcaccttcgagtacgtgtcccagcctttcctgatggacctggaaggcaagcagggcaacttcaagaatctgagagagttcgtgttcaaaaatatcgatggctacttcaagatctacagcaagcacacccctatcaatctgggccgggacctgccccagggcttctccgccctggagcctctggtggacctgcccatcggcatcaacatcacccggttccagaccctgctggccctgcacagaagctacctgacccctggcgacagcagctctggctggacagccggagcagctgcctactacgtgggctacctgcaacctcggaccttcctgctgaagtacaacgagaatggcaccatcaccgacgccgtggattgtgccctggaccctctgagcgaaaccaagtgcaccctgaagtctttcacagtggaaaagggaatctaccagacaagcaatttccgggtgcagcccaccgagtccatcgtccggtttcctaacatcaccaacctgtgcccttttgacgaggtgttcaacgccaccaccttcgccagcgtgtacgcctggaatagaaagcggatcagcaactgcgtggccgactacagcgtgctgtacaacttcgcccctttcttcgccttcaagtgctacggcgtgtcccccaccaagctgaatgacctgtgcttcaccaatgtgtacgccgacagcttcgtgatccggggcaatgaagtgagccagatcgccccaggccagaccggcaatatcgccgattacaattacaagctgcccgacgacttcacaggctgcgtgatcgcctggaatagcaacaagctggactctaccgtgggcggcaactacaactaccggtacagactgttccggaagtctaagctgaagcccttcgaaagagacatcagcaccgagatctaccaggccggaaacaagccttgcaatggcgtggccggcgtgaactgctactttcccctgcagagctacggcttcaggcctacctacggcgtgggccaccagccttaccgggtggtggtgctgagcttcgagctgctgcacgcccctgccaccgtgtgcggccccaagaagtccacaaacctggtgaagaataagtgtgtgaattttaatttcaacggcctgaccggcaccggcgtgctgaccgaaagcaataagaagttcctgcccttccagcagttcggccgggacatcgccgacacaacagatgcagtgagggacccacagaccctggagatcctggacatcaccccctgcagcttcggcggcgtgtccgtgatcacccccggcacaaacaccagcaatcaggtggccgtgctgtaccagggcgtcaattgcacagaggtgcctgtggccatccacgccgaccagctgacacctacctggagagtgtactccaccggcagcaacgtgttccagacccgggccggctgcctgatcggcgccgaatacgtgaacaatagctacgagtgcgatatccccatcggcgccggcatctgcgctagctaccagacccagaccaagagccacggcagcgccagcagcgtggcctcccagtccatcatcgcctacaccatgagcctgggcgccgagaattccgtggcctacagcaacaattccatcgctatccctaccaatttcaccatctccgtgacaaccgagatcctgcccgtgagcatgaccaagaccagcgtggactgcaccatgtacatctgcggcgactccaccgagtgcagcaacctgctgctgcagtacggcagcttctgcacccagctgaagcgcgccctgaccggcattgccgtggagcaggacaagaatacccaggaagtgttcgcccaggtgaagcagatttacaagaccccccctatcaagtacttcggcggcttcaatttcagccagatcctgcccgacccctctaaacctagcaagcggtccttcatcgaggacctgctgttcaataaggtgacactggccgacgccggcttcattaagcagtacggcgactgcctgggcgacatcgccgcccgggacctgatctgcgcccagaagttcaacggcctgaccgtgctgcctcccctgctgaccgacgagatgatcgcccagtacacctccgccctgctggccggaaccatcaccagcggctggaccttcggcgccggagccgcactgcagatccctttcgccatgcagatggcctaccggttcaacggcatcggcgtgacacagaatgtgctgtacgagaaccagaagctgattgccaaccagttcaatagcgccatcggcaagatccaggactccctgagcagcaccgccagcgccctgggcaagctgcaggacgtggtgaaccacaatgcccaggccctgaataccctggtgaagcagctgagcagcaagttcggcgccatctccagcgtgctgaacgatatcctgagcagactggacccacctgaggccgaggtgcagatcgacagactgatcaccggcagactgcagtccctgcagacctacgtgacccagcagctgatcagagccgccgagatccgggccagcgccaatctggccgccaccaagatgagcgagtgcgtgctgggccagagcaagagagtggatttctgcggcaagggataccacctgatgtccttccctcagagcgcccctcacggcgtggtgttcctgcacgtgacatacgtgcctgcccaggagaagaatttcaccaccgcccccgccatctgccacgacggaaaggcccacttccccagagagggcgtgttcgtgtctaatggcacccactggttcgtgacacagagaaacttctacgagccccagatcatcacaaccgacaacaccttcgtgagcggcaattgtgacgtggtgatcggcatcgtgaataacaccgtgtacgaccccctgcagagcgaactggacagcatcaaggaggagctggacaagatccacaagaacggctccggaggctctggcgatattatcaagctgctgaatgagcaggtgaataaggagatgcagagctccaacctgtacatgtccatgagctcctggtgctacacccacagcctggacggcgccggcctgttcctgttcgatcacgccgccgaggagtacgagcacgccaagaagctgatcatcttcctgaatgagaataatgtgcccgtgcagctgaccagcatctccgcccctgagcacaagttcgagggcctgacccagatctttcagaaggcctacgaacacgagcagcacatctccgagagcatcaataatatcgtggaccacgccatcaagagcaaggaccacgccaccttcaacttcctgcagtggtacgtggccgagcagcacgaagaggaggtgctgttcaaggatatcctggacaagattgagctgatcggcaatgagaaccacggcctgtacctggccgatcagtacgtgaagggcatcgccaagagcagaaagagcggcagctaa

SEQ ID NO: 563 - DNA, 3990 bp, synthetic construct
  source 1..3990: mol_type = other DNA
atggacagcaagggctccagccagaagggcagccggctgctgctgctgctggtggtgagcaacctgctgctgccccagggcgtggtgggccagagcgacctggacagatgtacaaccttcgacgacgtgcaggcccccaattacacccagcacaccagcagcatgcggggcgtgtactaccccgatgagatcttcagaagcgataccctgtacctgacccaggacctcttcctgcccttttacagcaatgtgacaggcttccacacaatcaatcacacatttggcaatcctgtgatcccttttaaggatggcatctacttcgccgcaaccgaaaagagcaatgtggtgcggggctgggtgttcggcagcacaatgaataataagagccagagcgtgatcatcatcaataatagcaccaacgtggtgatccgggcctgcaatttcgagctgtgcgacaatcccttcttcgccgtgagcaagccaatgggcacccagacccacacaatgatcttcgataatgccttcaattgcaccttcgagtacatcagcgacgccttcagcctggacgtgagcgagaaaagcggcaatttcaagcacctgcgggagttcgtgtttaagaataaggacggcttcctgtacgtgtacaagggctaccagcccatcgacgtggtgcgggacctgcccagcggctttaataccctgaagccaatcttcaagctgcctctgggcatcaatatcacaaacttccgggccatcctgaccgccttctcccccgcccaggacatctggggcaccagcgccgccgcctacttcgtgggctacctgaagcccaccacattcatgctgaaatacgacgagaatggcaccatcaccgacgccgtggactgcagccagaatcccctggccgagctgaagtgtagcgtcaagagcttcgagatcgacaagggcatctaccagaccagcaacttcagagtggtgcctagcggcgacgtggtgagattccccaatatcacaaacctgtgccccttcggcgaagtgttcaacgccacaaagttcccttctgtgtacgcctgggagcggaagaagatcagcaactgcgtggccgattacagcgtgctgtacaatagcaccttcttcagcaccttcaagtgttacggcgtgagcgccaccaaactgaatgacctgtgcttcagcaacgtgtacgccgactccttcgtggtgaagggcgatgacgtgagacagatcgcccctggccagaccggcgtgatcgccgattacaactacaagctgcccgatgatttcatgggctgcgtgctggcctggaataccagaaatatcgacgccaccagcaccggcaactacaattacaagtacagatacctgagacacggcaagctgcggcccttcgagagagacatcagcaatgtgcctttcagcccagacggcaagccttgcacccctcctgccctgaattgctactggcccctgaatgattacggcttctacaccaccaccggcatcggctaccagccctaccgggtggtggtgctgagcttcgagctgctgaacgcccctgccaccgtgtgcggccccaagctgagcaccgacctgatcaagaatcagtgcgtgaattttaacttcaacggcctgaccggcaccggcgtgctgacccccagctctaagcggttccagcccttccagcagttcggcagagacgtgagcgacttcaccgactctgtgcgggatcccaagacctccgagatcctggacatcagcccttgcgccttcggcggcgtgagcgtgatcacacccggcaccaatgccagcagcgaagtggccgtgctgtaccaggacgtgaattgcaccgacgtgtccaccgccatccacgccgaccagctgacacccgcctggagaatctacagcaccggcaataacgtgttccagacccaggccggctgcctgatcggagcagagcacgtggacaccagctacgaatgcgacatccctatcggagccggcatctgcgcctcctaccacaccgtgagcctgctgcggagcaccagccagaagtccatcgtggcctacaccatgagcctgggcgccgacagctccattgcctactccaacaataccatcgccatccctaccaacttcagcatcagcatcaccaccgaagtgatgcctgtgagcatggccaagacaagcgtggactgcaatatgtacatctgcggcgactccaccgagtgcgccaacctgctgctgcagtacggctccttctgcacccagctgaatagagccctgagcggcatcgccgccgagcaggacagaaatacccgggaggtgttcgcccaggtgaagcagatgtacaagacccccacactgaagtacttcggcggcttcaatttcagccagatcctgcccgaccctctgaagccaaccaagcggagcttcatcgaagacctgctgttcaacaaggtgaccctggccgacgccggcttcatgaagcagtacggcgagtgcctgggcgatatcaacgcccgggacctgatctgcgcccagaagttcaacggcctgaccgtgctgccccctctgctgaccgacgacatgatcgccgcctacacagccgccctggtgagcggaaccgctacagccggctggacattcggcgccggcgccgccctgcagatcccattcgccatgcagatggcctacagattcaatggcatcggggtgacacagaatgtgctgtacgagaatcagaagcagatcgccaaccagttcaataaggccatctcccagatccaggagtccctgaccaccacctccaccgccctgggcaagctgcaggatgtggtgaatcagaatgcccaggccctgaataccctggtgaagcagctgagctccaacttcggcgccatcagctccgtgctgaacgacatcctgagccggctggaccctcctgaggccgaagtgcagatcgacagactgatcacaggccggctgcagagcctgcagacatacgtgacccagcagctgatcagagccgccgaaatcagagccagcgccaatctggccgccaccaagatgagcgagtgcgtgctgggccagagcaagagagtggacttctgcggcaagggctaccacctgatgagcttccctcaggccgcccctcacggcgtggtgttcctgcacgtgacctacgtgcccagccaggagcggaacttcaccaccgcccctgccatctgccacgagggaaaggcctacttccctcgggagggcgtgttcgtgtttaatggcacaagctggttcatcacccagagaaacttcttcagcccccagatcatcacaaccgacaacaccttcgtgtccggcaactgcgatgtggtgatcggaatcatcaataataccgtgtacgaccccctgcagagcgagctggactccatcaaggaggagctggacaagatccacaagaatgggagcggcggctccggcgatatcatcaagctgctgaacgagcaggtgaataaggagatgcagagcagcaacctgtacatgagcatgtctagctggtgttacacccacagcctggatggcgccggcctgttcctgttcgaccacgccgccgaggagtacgagcacgccaagaagctgatcatcttcctgaatgagaataatgtgcccgtgcagctgacctctatcagcgcccccgagcacaagttcgaaggcctgacacagatcttccagaaggcctacgagcacgagcagcacatctccgagagcatcaacaatatcgtggaccacgccatcaagagcaaggaccacgccaccttcaatttcctgcagtggtacgtggccgagcagcacgaggaggaggtgctgttcaaagacatcctggacaagatcgagctgatcggcaacgagaatcacggcctgtacctggccgatcagtacgtgaagggcatcgccaagagcagaaagtccggcagctaa

SEQ ID NO: 564 - DNA, 3984 bp, synthetic construct
  source 1..3984: mol_type = other DNA
atggacagcaagggaagctcccagaaagggtccaggctgctgctgctgctcgtcgtgagcaacctgctgctgcctcagggcgtggtgggacaatctagccaggatgggtgcgctacactgagcaccaagctgactcccacccagctgcaggtgaactctactcggaggggattttactatttcgacgatatttatcgcagcagcctgagggtgctggtgccaggctatttcctgccattcggaacaaacatcactagataccaggcccaggtgatcaactggaccgccattttctttgacaaccctgtcatcccttttaatgacggagtgtacttcgccgcactggagcactccaatgtggtgagggggtggatctttggaacaacactggataacactacccagtccgcaatcgtcgtgaacaacgccacccacatcctgattagtgtgtgttacttcaacgtgtgcaaggaacctatgttcgccgtgtccaatttcaagccctacaagagctgggtgtacgatagggccaacaactgcacctttaatcgggcataccccctcaacatcagcacaactcccgagcctgggaagttcaaggcactgagagagcaggtgtttaggtaccaggacggctttctgtacatctatcacagctacgagtccattaattccgacactctgccccctggattctccgtgctgaaacctatgctgaagctgcctctgggactgaatatcacaagatttcgggtggtgatggccatgcactctctgactacaagcaacttcaacacccactctgtgaattatttcgtggggcacctgaaaccactgacaatgctggtggaattctcccctaacggcacaattattgacgcaatcgattgttcccaggatcccctgagcgagctgaaatgcaccacaaagtcattctccgtggagaagggcatctatcagacttccaatttccgggtgagcccctccctggacgtggtgcgcttcccaaatatgaccaacatctgcccctttgaccaggtgtttaataagactcagttcccttctgtgtacgcctgggaaagagtgaggatcagcgactgcgtgagcgactacacagtgctgtataattcttccgcttcttttagcacattcaaatgctacggcgtgtccccaacaaagctgaacgacctgtgcttctccggagtgtatgccgattacttcgtggtgaagggggaccacgtccaccagattgcacctggacagacaggcgtgatcgccgactataattacaagctcccttccgaatttgtgggctgcattctggcttggaacacaaggactattgactccaagagggggttttactaccggctgttcagacacggcaatatccggccatatgagagggatacctccaacgtgccctacaatgctgccgggggaacctgcaaccagccaggaactcacaactgctacgagcctctgcaggattacggcttcacttccactagcggagtggggtaccagccctttcgcgtggtggtgctgtctttcgaactgctgaacgcccctgccacagtctgtgggcctaagcagagcactgacctggtgaagaataagtgcgtgaatttcaacttcaatgggctgaccgggactggggtgctgactgactccaataagaagtttcagccatttcagcagttcggcagagatagcgctgatttcaccgactctgtgaaagatccaaagaccctggagatcctggatatcacaccctgtagctatggcggcgtgtctgtgattacccctggcaccaatacatctgacagcgtggccgtcctgtatcaggacgtgaactgtaccgatgtgcccacaatgctgcatatggaccaggtgtccaacgattggagggtgtatgctgtgaacaccgacggaaacatgttccagacacaggctgggtgcctcgtgggagctacctatgacaatacatcctatgagtgcgatatccccgtgggagctggcgtgtgtgccaaattccagaccaccggcagcgcctctcagagctccattctggcatatacaatgagcctgggagaggactccaatgtggcctactccaacaatagcattgcaatccctaccaattttacaatcagcgtgacaactgaagtcctgccagtctccatgaccaagacagccgtggattgcaacatgtatatctgcggagattctactgagtgttccagcctgctgctgcagtacggcagcttctgccagcagctgaacagggctctggccggcgtgtctgtggagcaggacaagaatacacaggacgtgtttgctcaggtgaagtctatctacaaggtgtctgctattaaggactttggcggctttaattttagccagattctgcctgacccagccaagcctagcaaacgctcttttatcgaagacctgctgtacaataaggtgactctggctgacccaggctttatgaagcagtacggggactgtctgggaggcgtgaacgccagggacctgatttgtgcacagaagttcaacggcctgaccgtgctgccccccctgctgacagacgatatgattgcagcttacacatccgccttagtgagcggcaccgccctgagcggattcacattcggggctggagccgcactgcagatcccctttgccatgcagatggcctacaggttcaacggcatcggcgtgactcagaacgttctgtatgagaatcagaagcagattgcaaaccagtttaataaggcaatctcccagattcaggagagcctgacaaccaccgccaccgccctgggcaagctgcaggatgtgatcaaccagaacgctatcgccctcaacaccctggtgaaacagctgagctccaacttcggagctatctcctccgtcctgaacgacattctgtccagactggatccacctgaagccgaggtgcagattgacagactcattacaggcagactgcagtcactgcagacctacgtgacccaacaactgatcagagccgcagacatcagggcaagcgccaacctggccgccaccaagatgagcgaatgcgtgctgggacagtctaagcgggtggacttctgtggcaaaggctatcacctgatgtccttcccacaggccgcacctcacggagtggtgttcctgcacgtcacttatgtgccaagccaggataagaattttacaacagcacctgctatctgccacaagggcaaggcctacttccccagagagggagtgttcgtgacaaacggaacacactggttcgtgacccagcgcaacttttatcagcctgaggtgatcacaacagagaacacattcgagagtggcaattgcgacgtcgtgatcgggatcgtgaacaacaccgtctacgaccctctgcagtccgagctggattctattaaggaggagctggataagatccacaagaacggatccggcggaagcggcgatattatcaaactgctgaatgagcaggtgaacaaggagatgcaatcctccaacctctacatgtctatgagcagctggtgttatacacattccctggacggagccggcctgttcctgttcgaccacgccgccgaggaatacgagcacgccaagaagctgatcatcttcctgaatgaaaacaatgtgcccgtgcagctgactagcatctcagcccctgagcataaattcgagggactgacccagattttccagaaggcctacgagcatgagcagcacatttccgaatccatcaataacattgtggaccacgccattaagtccaaggaccacgcaacctttaactttctgcagtggtatgtggccgagcagcacgaggaggaggtgctgtttaaagatatcctggataaaattgagctgatcggcaacgagaatcacggcctgtatctggctgaccagtacgtgaaggggatcgcaaagagccgcaaaagtgggagctaa

SEQ ID NO: 565 - DNA, 4281 bp, synthetic construct
  source 1..4281: mol_type = other DNA
atggacagcaagggcagcagccagaaaggcagccggctgctgctgctgctggtggtgtccaacctgctgctgccccagggggtggttggacagtatgtggacgttggaccagactcagtgaagtctgcctgtattgaagtggacatccagcagaccttcttcgacaagacctggccacgccctattgacgtgtctaaggccgacgggatcatctacccacaggggcggacatattccaatatcacaattacttaccagggactgtttccctaccagggcgaccacggcgacatgtacgtgtatagcgcaggccatgccaccggcaccactccccagaaactcttcgtggcaaactattcccaggatgtgaagcagttcgctaatgggtttgtggtgaggatcggagccgccgctaatagcacaggcactgtgatcattagcccttccacatccgctaccattagaaagatttatcccgccttcatgctgggctccagcgtgggaaatttcagtgacggcaagatggggagattcttcaaccacacactggtgctcctgcctgatggctgcggcaccctgctgcgggccttctactgcatcctggagcctaggagcggaaaccactgtcctgcaggcaatagctacacctcttttgccacctatcacacccctgcaacagactgttccgacggaaactacaacagaaacgctagcctgaatagctttaaggagtactttaatctgagaaactgcactttcatgtacacatacaatattaccgaggacgaaatcctggagtggttcggcattacccagacagcacagggagtgcacctcttttcttctaggtacgtggacctgtatggaggaaacatgtttcagttcgctaccctgccagtctacgacacaattaagtactattccatcatcccccacagcattagatctatccagagcgaccggaaggcctgggccgccttttatgtgtacaagctgcagcccctgacttttctgctggacttcagcgtggatggctacattagacgggctatcgattgcggatttaatgacctgagccagctgcactgttcctacgagtcctttgatgtcgagtccggcgtgtacagcgtgagcagcttcgaagccaaacccagcgggtccgtggtggaacaggccgaaggcgtcgagtgcgacttttcccccctgctgagcggaacaccaccccaggtgtacaactttaagcggctcgtgttcactaactgcaattacaatctgaccaaactgctgagcctgttcagcgtgaacgattttacatgttctcagatctctcccgcagccatcgcctctaactgctattccagcctgattctcgactacttctcttatcccctgagcatgaagtctgatctgagcgtgagcagcgccgggcccatttcccagttcaactacaagcagtctttcagcaatccaacatgtctgattctggccaccgtgcctcacaacctgacaaccattaccaaacccctgaagtactcttacatcaataaatgtagcaggttcctgagcgatgataggaccgaggtgccccagctggtgaatgcaaaccagtactctccttgtgtgagcatcgtgccctccactgtgtgggaggacggagactactaccgcaagcagctgtcccccctggaaggaggaggctggctggtggcctccggcagcacagtcgctatgaccgaacagctgcagatgggatttggcatcactgtgcagtatggaacagatactaacagtgtgtgtcctaaactggagttcgccaacgacactaaaatcgcaagccagctgggaaattgcgtggagtatagcctgtatggcgtgagcggccggggagtgttccagaactgcactgccgtgggcgtgagacagcagaggttcgtgtacgatgcttaccagaacctggttggctactatagcgacgatgggaactactattgtctgagagcctgtgtgtctgtgcctgtgagcgtgatctacgacaaggagacaaaaacacatgccaccctgttcgggtccgtggcttgtgaacacatctccagcaccatgagccagtactcccggtccacacgctccatgctgaaacgcagggactccacatacggcccactgcagacccctgtgggctgcgtgctggggctggtgaacagcagcctgttcgtggaagactgtaaactgccactgggccaatccctgtgcgctctgcctgacacacctagcacactgacaccagcctctgtcggctccgtgcccggagagatgcggctggcctctattgcctttaatcatccaatccaggtggatcagctgaacagctcatacttcaagctgagcatccccacaaatttctccttcggcgtgacacaggaatatatccagacaacaattcagaaagtgactgtggactgcaagcagtatgtgtgtaacggcttccagaagtgcgagcagctgctgcgggagtatggccagttctgctctaagatcaatcaggcactgcatggggcaaacctgcgccaggacgacagcgtgagaaacctcttcgcttctgtgaaaagcagccagagctctcccatcatcccaggcttcgggggcgactttaacctgacactcctggagccagtgagcatctccacaggcagccgctccgcccgcagcgcaatcgaagacctgctgttcgataaggtgaccatcgctgatccaggctatatgcaggggtatgacgactgcatgcagcagggccccgcctctgcaagggacctgatttgcgcacagtacgtggccggatacaaggttctgcctccactgatggatgtgaacatggaagccgcctatacctcctccctgctgggcagcatcgccggggttggctggacagccggcctgagctctttcgctgcaatcccattcgcccagtctatcttctatagactgaacggcgtggggatcacccagcaggtgctgtccgaaaatcagaaactgatcgctaataagttcaaccaggccctgggcgctatgcagaccggattcaccacaactaacgaagccttccacaaggtgcaggatgccgtgaataacaacgcccaggcactgtccaagctggcctccgagctgtctaatacatttggggccatctcagccagcatcggggacatcatccagagactggacccacctgagcaggatgctcagatcgacaggctgatcaacggcaggctgacaacactgaacgctttcgtggcccagcagctggtgagaagcgagtccgccgccctgtcagctcagctggccaaagataaggtcaacgaatgcgtgaaggcccagtctaagcggtctggattctgcggccagggcactcacattgtctctttcgtggtgaacgccccaaacggcctgtactttatgcacgtgggctactatccatctaaccatatcgaggtggtgagcgcttacggcctctgtgacgccgccaaccctacaaattgtatcgctcctgtgaacggctactttatcaagaccaataatacacgcattgtggacgaatggagctacactggcagctccttctacgcccccgagccaatcactagcctgaacactaagtacgtggccccacaggtcacttaccagaatatcagcactaacctgccccctcctctgctggggaactccaccggcatcgacttccaggacgagctcgacgagattcataagcagggctccggcggcagcggcgacatcatcaagctgctcaatgagcaggtgaacaaggaaatgcagtctagcaacctgtatatgtccatgtcctcttggtgttacacacacagcctggacggcgccggactgttcctgttcgatcacgccgccgaggaatatgagcacgccaagaagctgatcatctttctgaacgagaacaatgtgccagtgcagctgaccagcatctccgcccccgagcacaagttcgagggactgacccagattttccagaaggcatacgagcacgagcagcatatttccgaaagcattaataacatcgtggatcacgccatcaagagcaaggaccacgcaacattcaacttcctgcagtggtacgtggccgagcagcacgaggaggaggtgctgtttaaagacattctggacaaaattgagctgattggaaatgagaatcatggcctgtacctggccgaccagtatgtgaaggggatcgcaaagagccgcaaatccggcagctaa

SEQ ID NO: 566 - DNA, 3909 bp, synthetic construct
  source 1..3909: mol_type = other DNA
atggattccaagggcagcagccagaagggcagccggctgctgctgctgctggtggtgagcaacctgctgctgcctcagggcgtggtgggccagaccacctgcgtgaccggccccacaaccgagaataagcagaatgtgtccagcctgatgagaggcgtgtactaccctgacgatatctaccggagcaatgtgaacgtgctgttcaccgtgcccttcctgcggtttaacagcaccctgacctggtacaatttctggaatcaggcctacaccagcagagtgatggagttcggcgacggcatctactttagcaccgtggacaagagcaacgccgtgcggggctggatcttcggcaccaccctggacaataccacccagagcgccctgctgatcaataacggcagcctggtgaccatccaggtgtgctacttccagttttgcgccaaccctgccttcctggtggccggcggacagcagacaagcgccgccgtgtacatcagcagccacaattgcacctacagcgaggtgctgagccacatcagcctggacttcaccgaggacaccggcagcttcaagcggctgagagagtttgtgttcaagaataatgacggctttctgcacatctacggcgcctacgagccccacgtgatcggcatcggcgtgacccccagcctgcccagcaccttcaagcccctgatccccctgtggaagctgcctctggggctgaatatcaccaatttcaaggtggtgctgaccttccggtccaacagccagcctctgcaggccaatttcgccgtgggcagcctgaagctgaccaccttcatgctgtccttcgacatcaatggcaccatcgacaaggccgtggactgctcctccgaccccctgagcgagctgaagtgcacactgaagtccttcaatgtgagcaagggaatctaccctaccagcaatttccgggtgctgcccagcaccgaggtggtgcggttccccaatatcaccaatttctgccccttcgacaaggtgtttaacgcaacccggttccccaacgtgtacgcctggcagcggaccaagatcagcgactgcatcgccgactacaccgtgctgtacaatagcacctccttcagcaccttcaagtgctacggcgtgagccctagcaagctgatcgacctgtgcttcaccagcgtgtacgccgacacctttctgatcagattcagcgaggtgcggcagatcgcccccggcgagacaggagtgatcgccgactacaactacaagctgcctgacgacttcaccggctgtgtgctggcctggaacaccgcccagcaggacatcggcagctacttctacagaagccaccgggccgtgaagctgaagcccttcgagagggacctgagcagcgacgagaatggcgtgcggacactgagcacatacgacttcaatcctaatgtgcccctggactaccaggccacccgggtggtggtgctgtccttcgagctgctgaacgcccctgccacagtgtgcggccccaagctgagcacccagctggtgaagaatagatgcgtgaatttcaatttcaacggcctgagaggcacaggcgtgctgaccgactccgacaagaggttccagagcttccagcagttcggcagagacagcgccgactttaccgacagcgtgagagatcctcagacactgcagatcctggacatcagcccctgcagctttggcggcgtgagcgtgatcacccccggcacccagaccagcagcaaggtggccgtgctgtaccaggacgtgaactgcaccgacgtgcccacagccctgggcctggaccagatctccgccgcctggagagtgtacgccatcggcaacgacgtgttccagacccaggccggctgcctggtgggcgccgagcacaccaacatcagctacgagtgtgatatccccatcggcgccggggtgtgcgccagctacaatagcggcagcgcctccgtgggcaccaatagcatcatcgcctacgccatgagcatcggcgccgagagcagcatcgcctactccaacaatagcatcgccatccccaccaacttcagcatccaggtgacaaccgaagtgctgcccgtgagcatgtccaagacaagcgtggactgcaccatgtacatctgcggcgatagccaggagtgtaataagctgctgctgcagtacggcagcttttgcgcccagctgaatcgggccctgagcggcgtggccgtggagcaggacaagaacaccgaggccgtgttcgcccaggtgaagcagatctacaaggcccccgtgatcaaggacctgggcggcttcaacttcagccagctgctgcccgaccctacaaagcctagccagcggtccttcatcgaggacctgctgttcgacaaggtgaccctgagcgacgccggcttcatcaagcagtacggcgattgtctgggcgacatcgccgcccgggacctgatctgcgcccagaagttcaacggcctgacagtgctgcctcctctgctgaccgacgagatgatcgccgcctacaccagcgccctggtgagcggcaccgccacagccggatggacattcggcatcggcgccgccctgcaggtgcctttcgccatgcagatggcctaccggtttaacggcatcggcgtgacccagaacgtgctgtacgagaatcagaagctgatcgcaaaccagttcaactccgccatcggcaagatccaggacagcctgctgagcaccgccagcgccctgggcaagctgcaggacgtggtgaatcagaatgcccaggccctgaacaccctggtgaagcagctgtctagcaacttcggcgccattagcagcgtgctgaacgacatcctgagcagactggacccccccgaggccgaggtgcagatcgatcggctgatcaccggccggctgcagagcctgcagacctacgtgacccagcagctgatcagagctgccgagatccgggccagcgccaatctggccgccaccaagatgtccgagtgcgtgctgggccagagcaagcgggtggacttctgcggcaagggctaccacctgatgtccttcccccagagcgcccctcacggcgtggtgtttctgcacgtgacatacgtgcccgcccaggagaagaacttcaccaccgcccctgccatttgctacgacggcaaggcccacttccctcgggaaggcgtgttcgtgagcaatggcacccactggtttgtgacccagagaaacttctacgagccccagatcatcaccacagacaacaccttcgtgagcggcacctgtgacgtggtgatcggcatcgtgaacaataccgtgtacgaccccctgcagagcgagctggacagcatcaaggaggagctggataagatccacaagaacggcagcggcggcagcggcgatattatcaaactgctgaatgagcaggtgaacaaggagatgcagtctagcaacctgtacatgtccatgagctcctggtgctacacccacagcctggacggcgccggcctgttcctgttcgaccacgccgccgaggagtacgagcacgccaagaagctgatcatcttcctgaatgagaataacgtgcccgtgcagctgaccagcatcagcgcccccgagcacaagttcgaaggcctgacccagatcttccagaaggcctacgagcacgagcagcacatcagcgagagcatcaacaacatcgtggaccacgccatcaaaagcaaggatcacgccaccttcaatttcctgcagtggtacgtggccgagcagcacgaggaggaggtgctgttcaaggacatcctggacaagatcgagctgatcggcaatgagaaccacgggctgtacctggccgatcagtacgtgaagggcatcgccaagagccggaagtccggcagctaa

SEQ ID NO: 567 - DNA, 3879 bp, synthetic construct
  source 1..3879: mol_type = other DNA
atggattccaagggaagctcccaaaagggcagccggctgctgctgctgctggtggtgtccaacctgctcctgccccagggagtggtgggccagagcagccaatgcgtcaatctgaccacaagaacacagctgccccccgcctacaccaattctttcacacggggagtgtactaccctgacaaggtgttcagaagcagcgtgctgcactctacccaggacctcttcctgcccttcttctccaatgtgacctggttccacgccattcacgtgagcggcaccaatggcaccaagcggtttgacaatcctgtgctgccctttaatgacggagtgtactttgccagcaccgaaaagtctaatatcattagaggctggatcttcggcaccacactggatagcaagacccagtctctgctgatcgtgaacaatgccaccaacgtggtgatcaaggtgtgtgaattccagttttgcaatgatcctttcctgggcgtctattaccacaagaataataagagctggatggaaagcgagtttcgggtgtactccagcgcaaataattgcaccttcgagtacgtctctcaaccattcctgatggatctggaggggaagcagggcaatttcaagaatctgagagagttcgtgttcaagaatatcgatggctacttcaagatctacagcaagcacacccccatcaacctggtgcgggatctgcctcagggctttagcgccctggaacctctggtcgacctgcccatcggcatcaacatcaccagattccagacactgctggccctgcaccggtcctacctgacacctggcgatagcagctccggatggacagccggcgctgccgcctactacgtgggctacctgcagcctcggacattcctgctgaaatacaatgaaaatggcaccatcaccgatgccgtggactgcgccctggaccctctgagcgaaaccaagtgcaccctgaagtccttcacagtcgagaagggcatctaccagacctctaatttcagagtccagcccacagagagcatcgtgagattccctaacatcaccaatctctgccctttcggcgaagtgtttaatgccacccggtttgccagcgtgtacgcctggaaccggaagagaatttccaattgcgtggcagactactccgtgctgtataatagcgcctccttctctacctttaagtgctacggggtgagccctacaaagctgaatgacctgtgctttaccaatgtgtacgctgacagcttcgtcatccggggcgacgaggtgagacagatcgccccaggccagaccggcaaaatcgccgactacaactacaaactgcccgacgacttcacaggctgtgtgatcgcctggaattctaataatctggactccaaggtgggcggcaactacaattacctgtaccggctgttcagaaaaagcaatctgaaacctttcgagagagacatctccacagagatctaccaggccggcagcaccccctgtaatggcgtggagggcttcaattgctacttccctctgcagtcctacggcttccagcctaccaatggcgtgggctaccagccttacagagtggtggtgctgtccttcgagctgctgcacgctcctgccacagtgtgcggccctaagaagtctaccaacctggtgaagaataagtgtgtcaacttcaatttcaatggcctgaccggcaccggcgtgctgaccgagagcaataagaagtttctgcccttccagcagttcggcagagacatcgctgacacaacagacgccgtgcgggatccccagaccctggagatcctggacatcaccccttgcagcttcggcggcgtgagcgtgatcacccctggcaccaataccagcaatcaggtggccgtgctgtaccaggacgtgaattgcaccgaggtgcctgtggccatccacgccgatcagctgacccctacctggagagtctacagcaccggaagcaacgtgttccagacccgggccggctgtctgattggcgccgagcacgtgaataattcttacgaatgtgacatccccatcggcgccggcatctgcgcctcttaccagacccagacaaacagccctcggagagccagatccgtggctagccagtccatcatcgcttacaccatgtccctgggcgccgagaatagcgtggcctacagcaataatagcattgctatccctaccaatttcaccatcagcgtcaccacagagatcctgcctgtgagcatgacaaagaccagcgtggactgcaccatgtacatttgcggcgactccaccgagtgtagcaacctgctgctgcagtacggcagcttctgcacccagctgaatagagccctgaccggcatcgccgtggagcaggacaagaatacacaggaggtgtttgcccaggtgaagcagatctacaagacaccccctatcaaggactttggcggattcaatttctcccagatcctgcctgacccttccaagccctctaaacggagcttcatcgaggacctgctgttcaacaaggtgaccctggccgacgccggcttcatcaagcagtacggcgattgcctgggcgacatcgctgcccgggacctgatctgcgcccagaagttcaatggcctgaccgtgctgcctcctctgctgacagacgagatgatcgcccagtacacaagcgccctgctggccggcacaatcaccagcggctggaccttcggcgccggggccgccctgcagatcccctttgccatgcagatggcctacagatttaatggcatcggcgtcacccagaatgtgctgtacgagaaccagaagctgatcgccaaccagttcaattccgccatcggcaagatccaggattctctgagcagcaccgcctccgcactgggcaagctgcaggacgtggtgaaccagaatgcccaggccctgaataccctggtgaagcagctgtcctccaatttcggagccattagctccgtgctgaatgacattctgtccagactggacccccccgaggccgaagtgcagatcgaccggctgatcaccggcagactgcagtccctgcagacatacgtgacccagcagctgatcagagccgccgaaattcgggccagcgccaatctggccgccacaaagatgagcgagtgtgtgctgggccagagcaagagagtggacttctgcggcaagggataccacctgatgagcttccctcagagcgctcctcacggcgtggtgttcctgcacgtgacatacgtgcccgcccaggagaagaatttcaccaccgccccagccatctgccacgacggcaaggctcacttccctagggagggcgtgttcgtgagcaatggcacccactggtttgtgacccagagaaacttctacgagccccagatcatcaccacagacaataccttcgtgagcggcaattgcgatgtggtgattggcatcgtgaataataccgtgtacgaccctctgcagcctgagctggacagcttcaaggaggagctggataaatacttcaagaatcacacctcccctgatgtggacctgggcgacatctccggcatcaatgcttccgtggtgaacatccagaaggagatcgatcggctgaacgaggtggccaagaatctgaatgagtccctgatcgacctgcaggagctgggcaagtacgagcagtacatcaagtggccctggtacatctggctgggctttatcgccggcctgattgctatcgtgatggtgaccatcatgctgtgctgcatgaccagctgctgcagctgcctgaagggctgctgttcctgcggctcctgctgcaagtttgacgaagatgacagcgaacctgtgctgaagggcgtgaagctgcactactaa

SEQ ID NO: 568 - DNA, 3870 bp, synthetic construct
  source 1..3870: mol_type = other DNA
atggactccaagggaagctcccagaagggatccaggctgctgctgctgctcgtggtgagcaacctgctgctgccacagggcgtcgtcggccagtctagccagtgcgtgaacttcactactaggactcagctccctcccgcatatacaaattccttcaccagaggcgtgtactaccccgacaaggtgtttcggtcttctgtgctccactccacccaggacctcttcttaccatttttcagcaacgttacttggtttcacgccatccatgtgagcgggaccaacggaactaagagatttgccaaccccgtcctgccatttaacgacggcgtgtattttgcttccaccgaaaagagcaacatcattagaggctggatttttggcaccaccctggattccaaaacccagagcctgctgattgtcaataacgctaccaacgtggtcattaaggtgtgcgagtttcagttctgcaatgatccctttctgggggtgtactatcacaaaaataacaagagctggatggagtccgagttcagggtgtattctagcgccaacaattgcacatttgaatatgtgagtcagcctttcctgatggacctggaggggaagcagggaaactttaagaatctgcgcgagtttgtctttaagaatattgacgggtatttcaagatttactccaagcacacacccatcaacctggtgcggggactgccacaggggttctctgcactggagcctctggtggatctgcccatcggcatcaatattacccgctttcagaccctgcacatcagctatctgacacctggcgacagtagcagcggatggactgctggcgccgccgcctactacgtgggatatctccagcctcggacatttctgctgaaatacaatgagaacgggactattacagacgccgtggactgtgcactcgatccactcagcgagactaagtgcactctgaagtccttcaccgtggagaaaggcatctatcagacaagcaatttcagagtccagcccaccgagagcattgtgagattcccaaatatcactaacctgtgcccttttggggaggtgttcaacgcaacacgcttcgcctctgtgtacgcttggaacagaaagagaatcagcaattgcgtggcagattactccgtcctgtacaacagcgccagctttagtactttcaaatgctacggagtgagccctacaaagctcaacgacctgtgtttcacaaatgtgtacgccgatagcttcgtgatcagaggggacgaggtgcggcagatcgcacccggacagaccggcaatatcgccgactataactataagctgcctgacgatttcactgggtgtgttatcgcttggaacagcaacaacctggactctaaggtgggcgggaactataactacctgtaccgcctgttcagaaagagcaatctcaaaccattcgagcgggacatctccaccgaaatctaccaggctggctctaccccctgcaacggcgtgaagggcttcaactgctacttccctctccagagctatggattccagcctacatacggagtgggataccagccctatagggtggtggtgttgtcttttgaactgctgcacgcccctgcaactgtgtgcgggcctaagaaatctactaacctggttaagaataagtgcgtgaacttcaactttaatggactgactgggaccggcgtgctgaccgagagcaataagaaattcctgccttttcagcagtttgggcgcgatatcgctgacacaaccgacgccgtgcgggacccacagactctggagatcctggacatcacaccttgctccttcggcggagtgtccgtgattacccctgggactaatacaagcaaccaggtggcagtgctgtaccagggggtgaattgcacagaggtgcctgtggctattcatgctgatcagctcacacccacctggagagtgtacagcacaggcagtaacgtgtttcagaccagagccggatgtctgatcggagctgaacacgtgaacaatagctacgagtgcgatattcccatcggagcaggaatttgcgcatcctatcagacacagacaaattcccctagaagggctaggagcgttgcttcccagtccattattgcatatactatgagcctgggagtggagaacagcgtggcctacagcaataactccattgccattcccaccaatttcactatttccgtgacaactgagatcctgccagtgagcatgacaaagaccagcgtcgattgtaccatgtatatctgcggcgatagcactgagtgtagcaacctgctgctgcagtatggctccttttgcacacagctgaatcgggccctgacagggatcgcagtggagcaggataaaaacactcaggaagtgttcgcccaggtgaagcagatctacaagacccctccaatcaaggactttggaggattcaacttttctcagattctgcctgacccttccaaaccttccaagaggtccttcattgaggacctcctgtttaacaaggtcacactggccgacgctggattcatcaagcagtacggcgactgtctcggggacattgccgctcgggacctgatttgcgcccagaagttcaatgggctaaccgtgctgcctcccctgctgactgacgagatgatcgcccagtatactagcgctctgctggccggcacaattaccagcggatggaccttcggcgcaggcgccgcactgcagattcccttcgcaatgcagatggcttacagattcaacggcattggcgtgacgcagaacgtgctgtatgaaaatcaaaagctgattgctaaccagttcaattctgccatcgggaaaatccaggactctctgtcttctactgcttccgcactgggaaagctgcaggacgtggtcaatcagaatgcccaggcactgaatacactggtgaagcagctctccagcaactttggcgccatctccagcgtcctgaatgatatcctgagcaggctggatcctccagaagccgaggtccaaatcgatcgcctgattactggccggctgcagagcctgcagacatacgtgacacagcagctgatcagggccgccgagattagggcctccgcaaacctggctgccactaagatgtctgagtgcgtgctgggacagagcaagagagtggatttctgtggaaagggctatcacctgatgtctttcccccagagtgctccacatggcgtggtgttcctgcacgttacatacgtgcctgcacaggaaaagaattttacaacagctcctgccatctgccacgatggcaaagcccactttcccagagagggcgtttttgtgtctaatggaactcattggttcgtgacccagaggaatttctacgagcctcagatcatcaccactgacaacacattcgtgagcggcaactgtgatgtggtgatcggaattgtcaacaacaccgtgtatgaccctctgcagcccgaattggactccttcaaagaagaactggataagtatttcaagaatcatactagcccagatgtggacctgggcgacatcagcggcattaatgcctccgtcgtgaacatccagaaggagattgaccgcctgaacgaggttgccaagaacctgaatgagagcctgatcgatctgcaggagctgggcaaatatgagcagtatatcaagtggccttggtatatctggctgggctttattgccgggctgattgccatcgtcatggttacaatcatgctgtgttgcatgacctcttgctgcagctgcctgaaaggatgttgttcctgcggctcctgctgcaagttcgacgaggacgactccgagcctgttctgaagggagtcaagctgcactattaa

SEQ ID NO: 569 - DNA, 3864 bp, synthetic construct
  source 1..3864: mol_type = other DNA
atggattccaagggcagcagccagaagggcagccggctgctgctgctgctggtggtgagcaacctgctgctgcctcagggggtggtgggacagtccagccagtgcgtgaacctgatcaccagaacccagagctacacaaattctttcacccggggggtgtactaccccgataaagtgttcagaagctccgtgctgcacagcacccaggacctcttcctgccctttttcagcaatgtgacctggttccatgctatcagcggcaccaacggcaccaagagattcgacaaccctgtgctgcccttcaatgacggcgtgtacttcgccagcaccgagaaaagcaatatcatcagaggctggatcttcggcaccacactggacagcaagacccagagcctgctgatcgtgaacaacgcaaccaacgtggtgatcaaggtgtgcgagttccagttctgcaacgaccccttcctggacgtgtactaccacaagaacaataagagctggatggagagcgaattccgggtgtactccagcgccaataattgcaccttcgagtacgtgagccagcccttcctgatggacctggagggcaagcagggcaacttcaagaatctgcgggaattcgtgttcaagaacatcgacggctacttcaagatctacagcaagcacacccctatcaacctgggccgggacctgccccagggcttctccgccctggagcctctggtggacctgcccatcggcatcaatattacccggttccagacactgctggccctgcacaggagctacctgaccccaggcgacagcagcagcggatggacagccggcgccgctgcctactacgtgggctacctgcagccccggaccttcctgctgaagtacaatgagaacggcaccatcacagacgccgtggactgcgccctggacccactgagcgaaaccaagtgcacactgaagtccttcacagtggagaagggcatctaccagacaagcaatttccgggtgcagccaaccgagagcatcgtgagattccctaatatcaccaacctgtgcccttttgacgaagtgttcaatgccaccaccttcgccagcgtgtacgcctggaatcggaagagaatcagcaactgcgtggccgactacagcgtgctgtacaattttgcccctttcttcgccttcaagtgctacggcgtgagccccacaaagctgaatgacctgtgcttcaccaatgtgtacgccgacagcttcgtgatccggggcaacgaggtgagccagatcgcccctggccagacaggcaacatcgcagattacaattacaagctgcccgacgacttcaccggctgtgtgatcgcctggaattctaataagctggacagcaccgtgggcggcaactacaactaccggtacagactgttccgcaagagcaagctgaagcccttcgagcgggacatcagcaccgagatctaccaggccggcaacaagccctgcaatggcgtggccggcgtgaactgctacttccccctgcagagctacggcttcagacccacctacggcgtgggccaccagccttacagagtggtggtgctgagcttcgagctgctgcatgcccccgccaccgtgtgcggccccaaaaagagcaccaacctggtgaagaataagtgtgtgaacttcaatttcaatggcctgaccggcaccggcgtgctgaccgagagcaataagaagttcctgcccttccagcagttcggccgggatatcgccgacacaaccgacgccgtgcgggatcctcagaccctggagattctggacatcaccccttgctccttcggcggcgtgagcgtgatcacccccggcacaaatacctccaatcaggtggccgtgctgtaccagggcgtgaattgcacagaagtgcccgtggccatccacgccgaccagctgacccccacctggagagtgtacagcacagggagcaacgtgttccagacccgggccggctgcctgattggcgccgagtacgtgaataacagctacgagtgcgacatccccatcggcgccggcatctgcgccagctaccagacccagacaaagagccacggcagcgccagctccgtggccagccagtctatcatcgcctacaccatgagcctgggcgccgagaatagcgtggcctactccaacaatagcatcgccatccccaccaatttcaccatcagcgtgaccaccgagattctgcccgtgagcatgacaaagacaagcgtggactgtaccatgtacatctgcggcgacagcaccgagtgcagcaacctgctgctgcagtacggcagcttctgcacccagctgaagcgcgccctgaccggcatcgccgtggagcaggacaagaacacccaggaggtgttcgcccaggtgaagcagatctacaagaccccccccatcaagtacttcggcggcttcaatttctctcagatcctgcccgacccctccaagcctagcaagcggtccttcatcgaggacctgctgttcaataaggtgacactggccgatgccggcttcatcaagcagtacggcgactgcctgggcgatatcgccgcccgggacctgatctgcgcccagaagttcaacggcctgacagtgctgccccccctgctgaccgacgagatgatcgcccagtacaccagcgccctcctggccggcaccatcacctctggctggacattcggcgctggcgccgccctgcagatccctttcgccatgcagatggcctaccggttcaatgggatcggagtgacccagaatgtgctgtacgaaaatcagaagctgatcgccaaccagttcaatagcgccatcggcaagatccaggacagcctgagcagcaccgcctccgccctgggcaagctgcaggacgtggtgaaccacaatgcccaggccctgaacaccctggtgaagcagctgagcagcaagttcggcgccatcagcagcgtgctgaatgacatcctgagccggctggaccctcctgaggccgaggtgcagatcgaccggctgatcaccggcagactgcagagcctgcagacatacgtgacccagcagctgatccgggccgccgagatccgggcctccgccaatctggccgccaccaagatgtctgagtgcgtgctgggccagagcaagcgggtggacttctgcgggaagggctaccacctgatgagcttccctcagtccgcccctcacggcgtggtgttcctgcacgtgacatacgtgcccgcccaggagaagaatttcaccaccgccccagccatctgccacgacggcaaggcccactttcccagagaaggcgtgttcgtgagcaacggcacccactggttcgtgacccagagaaatttctacgagccccagatcatcaccaccgacaataccttcgtgagcggcaactgtgatgtggtgatcggcatcgtgaataacaccgtgtacgaccctctgcagcctgagctggactccttcaaggaggagctggacaagtacttcaagaaccacaccagccctgatgtggacctgggcgatatctccggcatcaacgccagcgtggtgaatattcagaaggagatcgacagactgaacgaggtggccaagaacctgaacgagagcctgatcgacctgcaggaactgggcaagtacgagcagtacatcaagtggccatggtacatctggctgggcttcatcgccggcctgatcgccatcgtgatggtgacaatcatgctgtgctgcatgacctcctgctgctcctgcctgaagggctgttgcagctgcggcagctgctgcaagttcgacgaggacgattccgagcccgtgctgaagggcgtgaagctgcactactaa

SEQ ID NO: 570 - DNA, 3819 bp, synthetic construct
  source 1..3819: mol_type = other DNA
atggattccaagggcagctcccagaagggctcccggctgctgctgctgctggtggtgtccaacctgctgctgcctcagggcgtggtgggccagagcgacctggacagatgcacaacctttgatgacgtgcaggcccccaactacacacagcacaccagcagcatgcggggcgtgtactaccctgacgagatcttccggagcgacaccctgtacctgacacaggacctcttcctgcccttctacagcaacgtgaccggcttccacaccatcaaccacaccttcggcaatcctgtgatccccttcaaggacggcatctacttcgctgccaccgagaagtccaatgtggtgcggggctgggtgttcggcagcaccatgaataataagagccagagcgtgatcatcatcaataatagcaccaatgtggtgatcagggcctgcaatttcgagctgtgcgacaatcccttcttcgccgtgagcaagcctatgggcacccagacccacaccatgatcttcgacaatgccttcaattgcaccttcgagtacatcagcgacgcctttagcctggacgtgtccgaaaaaagcggcaatttcaagcacctgcgggagttcgtgttcaagaataaggacggctttctgtacgtgtacaagggctaccagcccatcgacgtggtgcgcgacctgcccagcggcttcaataccctgaagcccatcttcaagctgcccctgggcatcaatatcaccaactttcgggccatcctgaccgccttcagccctgcccaggatatctggggcaccagcgccgccgcctacttcgtgggctacctgaagcccacaacattcatgctgaagtacgacgagaatggcaccatcaccgacgccgtggactgcagccagaatcctctggccgagctgaagtgcagcgtgaagtcctttgagatcgataagggaatctaccagaccagcaacttccgggtggtgcctagcggcgacgtggtgcggttccctaatatcaccaacctgtgccccttcggcgaggtgttcaatgccaccaagttcccctccgtgtacgcctgggagagaaagaagatcagcaattgcgtggccgactacagcgtgctgtacaattctaccttcttctccaccttcaagtgctacggcgtgtctgccaccaagctgaacgacctgtgcttttccaacgtgtacgccgacagcttcgtggtgaagggcgacgacgtgcggcagatcgcccctggccagaccggcgtgatcgctgattacaactacaagctgccagatgacttcatgggctgcgtgctggcctggaacaccagaaatatcgacgccaccagcaccggaaactacaactacaagtaccggtacctgcggcacggcaagctgcggccctttgagcgggacatcagcaacgtgcctttcagccctgacggaaagccctgtaccccccccgccctgaactgctactggcctctgaatgactacggcttctacaccacaaccggcatcggctaccagccttacagagtggtggtgctgagcttcgagctgctgaatgcccctgccaccgtgtgcggcccaaagctgagcaccgacctgatcaagaaccagtgcgtgaacttcaatttcaacggcctgaccggcaccggcgtgctgacccccagcagcaagagattccagcctttccagcagttcggcagagacgtgagcgacttcacagacagcgtgcgggaccccaagacatctgagatcctggatatcagcccctgcgccttcggcggagtgtccgtgattacccctggcaccaacgccagcagcgaggtggccgtgctgtaccaggacgtgaattgtaccgacgtgagcaccgccatccacgccgaccagctgacccctgcctggagaatctacagcaccggcaataacgtgttccagacccaggccggctgcctgattggcgccgagcacgtggacaccagctacgagtgtgatatccccatcggcgctggcatctgcgccagctaccacacagtgagcctgctgcggtccaccagccagaaaagcatcgtggcctacaccatgagcctgggcgccgacagcagcatcgcctacagcaataataccatcgccatccctacaaacttttccattagcatcaccaccgaggtgatgcctgtgtccatggccaagacctccgtggactgcaacatgtacatttgcggcgattctacagagtgcgccaacctgctgctgcagtacggctccttctgcacccagctgaatcgggccctgagcggcatcgccgccgaacaggatagaaatacccgggaggtgttcgcccaggtgaagcagatgtacaagacccccaccctgaagtacttcggcggcttcaacttcagccagatcctgccagatcccctgaagcccaccaagcggtcctttatcgaggacctgctgttcaacaaggtgacactggccgacgccggcttcatgaaacagtacggcgagtgcctgggcgacatcaatgcccgggacctgatctgcgcccagaagttcaatggcctgaccgtgctgccccccctgctgaccgacgacatgatcgctgcctacacagccgccctggtgagcgggaccgccaccgccggctggacatttggcgccggcgccgccctgcagatccctttcgccatgcagatggcctaccggttcaacggcatcggcgtgacccagaacgtgctgtacgagaatcagaagcagatcgccaaccagttcaataaggctatcagccagatccaggagagcctgacaaccacctccaccgccctgggcaagctgcaggacgtggtgaaccagaatgcccaggccctgaataccctggtgaagcagctgagcagcaattttggcgccatcagctctgtgctgaacgacatcctgtctcggctggaccccccagaggccgaggtgcagattgacaggctgatcaccggccggctgcagagcctgcagacctacgtgacccagcagctgatccgggccgccgagatccgggccagcgccaacctggccgccaccaagatgtccgagtgtgtgctgggccagagcaagcgggtggacttctgcggcaagggctaccacctgatgtccttcccccaggccgcccctcacggcgtggtgttcctgcacgtgacctacgtgcccagccaggagagaaatttcaccaccgcccccgccatctgccacgagggcaaggcatactttcccagagagggcgtgttcgtgttcaatggcacctcctggttcatcacccagcggaatttcttcagcccccagatcatcacaaccgacaacaccttcgtgagcggcaattgtgacgtggtgatcggcatcattaacaataccgtgtacgaccctctgcagcccgagctggacagcttcaaggaggagctggacaagtacttcaagaatcataccagccccgacgtggacctgggcgacatcagcggcatcaacgccagcgtggtgaatatccagaaggaaatcgacagactgaatgaggtggccaagaatctgaatgagtccctgatcgacctgcaggagctgggcaagtacgagcagtacatcaagtggccctggtacgtgtggctgggctttatcgccggcctgatcgccatcgtgatggtgaccatcctgctgtgctgcatgaccagctgctgcagctgtctgaagggcgcctgtagctgcggctcctgctgcaagttcgatgaggacgacagcgagcctgtgctgaagggcgtgaagctgcactactaa

SEQ ID NO: 571 - DNA, 3807 bp, synthetic construct
  source 1..3807: mol_type = other DNA
atggactctaagggcagcagccagaagggcagccggctgctgctgctgctggtggtgtccaacctgctgctgcctcagggcgtggtgggccagcaggacggctgtgccaccctgagcaccaagctgacccctacccagctgcaggtgaactccacccgccggggattttactacttcgacgatatctacagaagcagcctgcgggtgctggtgcctggctacttcctgcccttcggcaccaatatcacccggtaccaggcccaggtgatcaattggaccgccatcttcttcgacaaccctgtgatccctttcaacgatggcgtgtacttcgctgccctggagcacagcaatgtggtgagaggctggatcttcggcacaaccctggacaataccacccagtccgccatcgtggtgaataacgccacacacatcctgatcagcgtgtgttacttcaacgtgtgcaaggagcccatgttcgccgtgagcaatttcaagccctacaagagctgggtgtacgacagagccaataactgcaccttcaaccgggcctaccctctgaatatcagcaccacacccgagccaggcaagtttaaggccctgcgggagcaggtgttccggtaccaggacggctttctgtacatctaccacagctacgagagcatcaatagcgatacactgcctcccggcttcagcgtgctgaagcctatgctgaagctgcccctgggcctgaacatcaccagattccgggtggtgatggccatgcacagcctgacaacaagcaatttcaatacccacagcgtgaactacttcgtgggccacctgaagcctctgaccatgctggtggagttcagccccaatggcaccatcattgatgccatcgactgcagccaggaccctctgagcgagctgaagtgcaccaccaagagcttcagcgtggagaagggcatctaccagaccagcaatttcagagtgagccccagcctggacgtggtgcggttcccaaatatgacaaatatctgccctttcgaccaggtgtttaacaagacccagtttcccagcgtgtacgcctgggagcgggtccggatcagcgattgcgtgagcgactacacagtgctgtacaactccagcgccagcttcagcaccttcaagtgctacggcgtgagccccaccaagctgaacgacctgtgcttcagcggcgtgtacgccgactacttcgtggtgaaaggcgaccacgtgcaccagatcgcccccggccagacaggcgtgatcgccgattataattacaagctgcctagcgagttcgtgggctgtatcctggcctggaataccagaaccatcgacagcaagagaggcttctactacagactgttcagacacggcaacatcagaccctacgagagagacacctctaatgtgccctacaacgccgccggcggcacctgcaatcagcccggcacccacaattgctacgagcctctgcaggactacggattcaccagcacctccggcgtgggctaccagcctttcagagtggtggtgctgagcttcgaactgctgaacgcccccgccaccgtgtgtggccctaagcagtccaccgacctggtgaaaaacaagtgtgtgaatttcaatttcaatggcctgaccggcaccggcgtgctgaccgacagcaacaagaagttccagcccttccagcagttcggccgggacagcgccgacttcaccgacagcgtgaaggaccccaagacactggagatcctggacatcaccccttgtagctatggcggcgtgagcgtgatcacacctggcaccaataccagcgactccgtggccgtgctgtaccaggacgtgaattgtaccgacgtgcccaccatgctgcacatggaccaggtgagcaatgattggagagtgtacgccgtgaatacagacggcaacatgtttcagacccaggccggctgcctggtgggcgccacctacgacaatacctcctacgagtgcgacatccccgtgggcgccggcgtgtgtgccaagttccagaccaccacaagagccaaacagtctagcatcctggcctacaccatgagcctgggcgaggacagcaacgtggcctacagcaataacagcatcgccatccctaccaattttaccattagcgtgaccaccgaggtgctgcccgtgagcatgaccaagaccgccgtggactgcaatatgtacatctgcggcgactctaccgagtgcagcagcctgctgctgcagtacggcagcttctgccagcagctgaatagagccctggccggagtgagcgtggaacaggacaagaacacacaggacgtgttcgcccaggtgaaaagcatctacaaggtgagcgccatcaaggacttcggcggattcaacttctctcagatcctgcctgaccctgccaagcccagcaagagatccttcatcgaagacctgctgtacaacaaggtgaccctggccgaccctggcttcatgaagcagtacggcgactgcctgggcggcgtgaatgcccgggacctgatctgcgcccagaagttcaatggcctgacagtgctgccccctctgctgaccgacgacatgatcgccgcctacacaagcgccctggtgagcggcaccgccctgagcggattcaccttcggcgccggcgctgccctgcagatcccttttgccatgcagatggcctacagattcaatggcatcggcgtgacacagaatgtgctgtacgagaatcagaagcagatcgccaaccagttcaataaggccatcagccagatccaggagagcctgaccacaacagccaccgccctgggcaagctgcaggacgtgatcaaccagaatgctatcgccctgaataccctggtgaagcagctgtccagcaatttcggcgccatcagcagcgtgctgaatgacatcctgagcagactggacccccccgaggccgaggtgcagatcgacagactgatcaccggacggctgcagagcctgcagacctacgtgacccagcagctgatcagagccgccgacatccgggccagcgccaatctggccgccaccaagatgagcgaatgtgtgctgggccagtctaagcgggtggacttctgtggcaagggctaccacctgatgtctttccctcaggccgccccccacggcgtggtgttcctgcacgtgacatacgtgcccagccaggataagaacttcaccaccgcccccgccatctgccacaagggcaaggcctacttccccagagagggcgtgttcgtgaccaatggcacccactggttcgtgacacagcggaacttctaccagcccgaggtgatcaccaccgagaacacattcgagagcggcaattgtgacgtggtgatcggcatcgtgaacaataccgtgtacgaccctctgcagcccgagctggagagcttcaaggaggagctggacaagtacttcaagaatcacacctcccccgacgtggacttcgacgacatctctggcatcaacgctagcgtggtggacattaagaaggagattgagcacctgaacgagatcgccaagagcctgaacgagagcctgatcgacctgcaggagctgggcaagtacgaacagtacatcaagtggccctggtacgtgtggctgggcttcatcgccggcctgatcgccatcatcatggccacaatcatgctgtgctgcatgaccagctgctgcagctgcctgaagggcctgtgttcttgcggctcctgctgtaagttcgatgacgaccacagcgagcccgtgctgaagggagtgaagctgcactactaa

SEQ ID NO: 572 - DNA, 3738 bp, synthetic construct
  source 1..3738: mol_type = other DNA
atggacagcaaaggcagcagccagaagggctccagactgctgctgctgctggtggtgagcaacctgctgctgccccagggcgtggtgggccagacaacctgcgtgaccggacctaccaccgagaacaagcagaatgtgagcagcctgatgagaggcgtgtactaccccgacgatatctaccggagcaacgtgaatgtgctgttcaccgtgcccttcctgagattcaacagcacactgacctggtacaatttctggaatcaggcctatacctccagagtgatggagttcggcgacggcatctacttcagcaccgtggacaagagcaatgccgtgagaggctggatcttcggcaccaccctggacaataccacacagagcgccctgctgatcaataatggcagcctggtgaccatccaggtgtgctacttccagttttgtgccaaccctgccttcctggtggccggaggccagcagacctctgccgccgtgtacatcagctcccacaattgcacctactccgaggtgctgagccacatcagcctggacttcacagaggacaccggcagcttcaagcggctgagagagttcgtgttcaagaataatgacgggttcctgcacatctacggcgcctacgagcctcacgtgatcggcatcggcgtgacccccagcctgcctagcaccttcaagcctctgatccccctgtggaagctgcctctgggcctgaatatcaccaacttcaaggtggtgctgaccttccggagcaacagccagcctctgcaggccaatttcgccgtgggcagcctgaagctgacaaccttcatgctgtctttcgacatcaatggcaccattgacaaggccgtggactgtagcagcgaccccctgagcgagctgaagtgcaccctgaagtctttcaacgtgagcaagggcatctaccccaccagcaactttcgggtgctgccttccaccgaggtggtgcgcttccccaatatcaccaatttctgccctttcgacaaggtgttcaatgccaccagattccccaacgtgtacgcctggcagcggacaaagatcagcgactgcatcgccgactacacagtgctgtacaatagcaccagcttcagcaccttcaagtgttacggcgtgagcccttccaaactgatcgacctgtgcttcaccagcgtgtacgccgacaccttcctgatcagattctccgaggtgagacagatcgcccccggcgaaaccggcgtgatcgccgactacaattacaagctgcccgatgactttaccggctgcgtgctggcctggaataccgcccagcaggacatcggctcctacttctaccggagccaccgggccgtgaagctgaagccattcgaacgggacctgagctccgatgagaacggcgtgagaaccctgagcacctacgacttcaatcctaacgtgcccctggactaccaggccacccgggtggtggtgctgtccttcgagctgctgaatgccccagctaccgtgtgcggccccaagctgagcacccagctggtgaagaaccggtgtgtgaacttcaatttcaacggcctgcggggcacaggcgtgctgaccgactccgacaagcggttccagagcttccagcagttcggcagagacagcgccgatttcaccgatagcgtgcgggaccctcagaccctgcagatcctggacatctccccctgctccttcggcggcgtgagcgtgatcacacccggcacccagacaagcagcaaagtggccgtgctgtaccaggacgtgaattgtaccgatgtgccaaccgccctgggcctggatcagatcagcgccgcctggagagtgtacgccatcggcaatgacgtgttccagacccaggccggctgcctggtgggcgccgagcacaccaacatcagctacgagtgcgacatccccatcggcgccggcgtgtgcgccagctacaattcccccgccgcccgggtgggcacaaatagcatcatcgcctacgccatgagcatcggcgccgagagcagcatcgcctattccaataacagcatcgccatccctacaaatttctccatccaggtgaccaccgaggtgctgcctgtgagcatgtccaagaccagcgtggactgcaccatgtacatctgcggcgacagccaggagtgcaataagctgctgctgcagtacggcagcttctgcgcccagctgaatagggccctgagcggcgtggccgtggagcaggacaagaataccgaggccgtgttcgcccaggtgaagcagatctacaaagcccccgtgatcaaggacctgggcggcttcaattttagccagctgctgcccgaccctaccaagcctagccagagatcctttatcgaggacctgctgttcgacaaggtgaccctgagcgacgccggcttcatcaagcagtacggcgactgcctgggcgatatcgccgcccgggacctgatctgcgcccagaagttcaatggcctgacagtgctgcctcctctgctgaccgacgagatgatcgccgcctacacaagcgccctggtgagcggcacagccacagccggctggaccttcggcatcggcgccgccctgcaggtgcccttcgccatgcagatggcctacagattcaacggcatcggcgtgacccagaatgtgctgtacgagaaccagaagctgatcgccaaccagttcaatagcgccatcggcaagatccaggatagcctgctgtccaccgcctctgccctgggaaagctgcaggatgtggtgaatcagaacgcccaggccctgaacaccctggtgaaacagctgagcagcaatttcggcgccatcagcagcgtgctgaacgacatcctgagccggctggacccccctgaggccgaggtgcagatcgacagactgatcaccggcagactgcagagcctgcagacctacgtgacccagcagctgatcagagccgccgagatccgggccagcgccaacctggccgccaccaagatgagcgagtgcgtgctgggccagagcaagagagtggatttctgcggcaagggctatcacctgatgagctttccccagtccgcccctcacggcgtggtgttcctgcacgtgacctacgtgcccgcccaggagaagaatttcaccaccgcccccgccatttgctacgacggcaaggcccacttccctagagaaggcgtgttcgtgtccaacggaacccactggttcgtgacccagcggaatttctacgagcctcagatcatcaccaccgacaacaccttcgtgagcggcacctgcgacgtggtgatcggcattgtgaataataccgtgtacgaccccctgcagcctgagctggacagcttcaaggaggagctggataagtatttcaagaatcacaccagccccgacgtggacctgggcgacatctccggcatcaatgccagcgtggtgaatatccagaaggagatcgaccggctgaatgaggtggccaaaaatctgaatgagagcctgatcgatctgcaggagctgggcaagtacgagcagtacatcaagtggccctggtacatctggctgggcttcatcgccggcctgatcgccatcgtgatggtgacaatcatgctgtgctgtatgacaagctgctgcagctgcctgaagggctgctgcagctgtggcagctgctgcaagttcgacgaggacgacagcgagcccgtgctgaacggcgtgaagctgcactactaa

SEQ ID NO: 573 - DNA, 4101 bp, synthetic construct
  source 1..4101: mol_type = other DNA
atggactctaagggcagcagccaaaagggctccagactgctgctcctcctggttgtgtccaacctgctgctgccccagggagtcgtgggccagtacgtcgatgtgggcccagattctgtgaagtccgcctgtatcgaggtggacattcagcagacattcttcgacaagacatggcctagacccattgatgtgtctaaggccgacgggattatctatccccagggaaggacctattctaacattacaattacctatcagggcctgtttccctaccagggggaccacggcgacatgtatgtctactccgcaggacacgccactggaaccacacctcagaagctctttgtggctaactattctcaagacgtgaagcagttcgccaacggatttgtggtgcggatcggcgccgctgcaaacagcaccggcacagtgattattagcccttccactagcgccacaatccggaaaatttatcctgctttcatgctgggaagcagcgtgggaaattttagcgatggcaagatggggcggttcttcaaccacaccctggtgctgctgccagacggctgtgggaccctgctgagggctttttactgcatcctggagccccggtctggaaatcattgtcctgccggcaattcctatacctctttcgcaacctatcacactcccgctaccgactgctctgatggaaattataacagaaacgcttctctgaatagctttaaggagtatttcaatctgcgcaactgcacctttatgtacacttataacatcactgaggacgaaatcctggaatggtttggcatcactcagaccgcccagggcgtgcacctcttctcttctaggtacgtggacctgtacggggggaacatgttccagtttgctaccctgcctgtttatgataccattaagtactatagtattatcccacactcaattcgctccattcagtctgatagaaaggcttgggctgccttctatgtgtacaagctgcagcccctgacgtttctcctggatttcagcgtggacgggtatatccggcgcgccatcgactgcggctttaacgacctgtcccagctgcactgctcttacgaatcctttgacgtggagtcaggggtctactctgtgtcttctttcgaagccaaaccctccgggtccgtggtggagcaggccgagggcgtggagtgtgacttctctccactgctgagcggaactccaccacaggtctacaacttcaaacggctggtgtttacaaattgtaattataacctgactaagctactgagcctgttctccgtgaacgacttcacttgttcccagatctctcccgcagctattgccagtaattgctactcttctctgatcctggattacttcagctaccctctgtctatgaaatccgatctgagcgtgagctccgcaggaccaatcagccagtttaactataagcagagcttttctaaccccacttgcctgatcctggcaaccgtgcctcacaacctgaccactattaccaagccactgaagtacagctacatcaataaatgcagccgctttctgagcgacgaccgcacagaggtgccccagctcgtgaatgccaaccaatacagcccttgcgtcagcatcgtgccttccacagtgtgggaagacggagactactatcgcaagcagctgtctcccctcgagggcggcggatggctggtcgcttccggcagcacagtggccatgactgagcagctccagatggggttcgggatcaccgtgcagtatggcaccgacactaactccgtgtgccctaaactggaattcgcaaacgacaccaagatcgcaagccagctgggaaattgcgtggagtattccctgtatggcgtcagcgggaggggcgtgtttcagaattgcactgccgtgggagtgaggcagcagaggtttgtgtacgacgcctatcagaacctggtgggatattattctgacgatggcaattattattgtctgcgggcttgcgtctctgtgcccgtgagcgtgatttacgacaaagaaaccaagacccatgctacactgtttggctctgtggcatgcgagcacatcagctccactatgtctcagtattcccgctccaccagatctatgctgaagagaagagacagcacctacggccctctgcagacaccagtgggctgcgtgctgggcctggtgaactccagcctgttcgtggaggactgcaagctgccactgggccagtccttatgtgcactgcccgataccccatctactctcacaccacgcagcgttcggtctgtgcccggggagatgagactggcaagcatcgccttcaaccaccccattcaggtggaccagctgaattcctcttattttaaactctccatccccaccaacttctcttttggagtgacacaggaatatatccagactacaattcagaaggtgacagtcgactgcaaacagtatgtttgcaacgggttccagaagtgcgagcagctgctgagggagtacgggcagttttgctccaagatcaatcaggccctgcacggcgccaacctgcgccaggatgactctgtccggaacctcttcgcctctgtgaagtctagccagtctagcccaatcatccctggatttggcggagattttaatctgaccctgctggaacctgtcagcatcagcacaggcagcagatctgccaggtccgccatcgaggacctcctgtttgataaggtgacaattgcagaccctggatacatgcaggggtatgacgattgtatgcagcagggccctgcttccgccagggatctcatttgtgcacagtatgtggccggctacaaggtgctgcctcctctgatggatgtcaacatggaggctgcttatacttcttctctgctgggcagcattgctggagtgggatggacagcaggcctgagcagcttcgccgccatcccttttgcccagtctattttctataggctgaacggagtggggatcactcagcaggtgctgtctgaaaaccagaagctgatcgctaacaaattcaaccaggctctgggcgcaatgcagacagggtttactaccacaaacgaggcttttcacaaagtgcaggacgccgtgaacaacaacgcccaggctctgagcaagctggcttctgagctgtccaacacatttggcgctatctccgccagcattggcgacattatccagagactcgacccaccagaacaggatgctcagattgacagactgatcaacggacgcctgactactctgaacgccttcgtggcacagcagctggtgcgctcagagtccgctgcactgtctgcccagctcgctaaggacaaggtgaacgagtgcgtgaaggctcagtctaagcggagtggattttgcggacagggcacacacatcgtgagcttcgtggtgaacgctcccaacggcctgtattttatgcatgtgggctactacccctctaaccatatcgaggtcgtctccgcttacggcctgtgtgacgccgctaaccccactaactgcattgcccccgtgaacggctatttcatcaagaccaacaatactcgcattgtggacgagtggtcctacactggcagcagcttttacgccccagaaccaatcacatccctgaataccaagtatgtggcaccccaggtgacataccagaatatttctactaatctgcctcctcccctgctgggaaactccaccggcatcgactttcaggatgagctggatgagttcttcaaaaatgtgtccaccagtattcctaactttgggtccctgactcagatcaataccactctcctggacctgacttacgagatgctgagcctgcagcaggtggtgaaggccctgaacgagtcctatatcgatctgaaggaactgggcaattacacatattataataaatggccttggtatatctggctgggattcattgcaggcctcgtggccctggctctgtgtgtcttctttattctgtgttgtaccggatgtggcacaaactgcatggggaagctgaagtgcaatcggtgctgtgacagatatgaggagtacgacctggagccacacaaggttcacgtgtaa

SEQ ID NO: 574 - DNA, 3813 bp, synthetic construct
  source 1..3813: mol_type = other DNA
atgttcgtgtttctggtgctgctgcccctggtgagcagccagtgcgtgaacctgatcaccagaacacagagctacaccaacagcttcaccagaggcgtgtactaccccgacaaggtgttcaggagctccgtgctgcacagcacccaggacctgttcctgcccttcttttccaacgtgacctggttccacgccatccacgtgtccggcaccaacggcaccaagcgcttcgacaaccccgccctgcccttcaacgacggagtgtacttcgcttctaccgagaagtccaacatcatcagaggctggatctttggaaccacactggacagcaagacccagagcctgctgatcgtgaataacgccaccaacgtcgtgatcaaggtgtgcgagtttcagttctgcaacgaccccttcctggatgtgtaccagaagaataacaagagctggatggagagcgagttcagggtgtacagctccgccaacaattgtaccttcgagtacgtgtcccagcctttcctgatggacctggagggcaaggagggcaacttcaaaaacctgagggagttcgtgttcaagaatatcgacggctacttcaagatctacagcaaacacaccccaattaacctggagagggacctgcctcagggcttctccgccctggagcccctggtggacctgcccatcggcatcaatatcaccagattccagacactgctggccctgcacagaagctacctgacccccgtggacagcagcagcggctggactgccggcgccgccgcttactacgtgggctacctgcagcccaggacctttctgctgaagtacaacgagaacggcaccatcaccgacgccgtggattgcgccctggaccccctgtccgagacaaagtgcaccctgaagtctttcaccgtggagaagggcatctaccagaccagcaacttcagagtgcagcccaccgagtccatcgtgcgcttccccaacatcaccaacctgtgccccttccacgaggtgttcaacgccacaacctttgcctccgtgtacgcctggaacaggaagagaatcagcaactgcgtggccgactacagcgtgatctacaatttcgcccccttcttcgccttcaagtgttacggcgtgagccccaccaagctgaatgacctgtgcttcacaaacgtgtacgccgacagcttcgtgatcagaggcaatgaggtgagccagatcgcccccggccagaccggcaacattgccgattataattacaagctgcccgacgactttaccggctgcgtgatcgcctggaatagcaacaagctggactctaagcccagcggcaactataattacctgtacagactgttcagaaagagcaagctgaagcctttcgagagagacatcagcacagagatctaccaggccggcaacaagccatgcaatggcgtggctggcccaaactgctacagccccctgcagtcctacggctttcggcctacctacggcgtgggccaccagccctacagagtggtggtgctgagcttcgagctgctgcacgcccccgccaccgtgtgcggccccaaaaagagcaccaacctggtgaagaacaagtgcgtgaacttcaatttcaacggcctgaccggcaccggcgtgctgaccgagtccaacaagaagttcctgccctttcagcagttcggccgggacatcgccgacaccaccgacgccgtgagggacccccagaccctggagatcctggacatcaccccatgttcctttggcggcgtgagcgtgatcacccctggcactaacaccagcaatcaggtggccgtgctgtaccagggggtgaactgcaccgaggtgcccgtggctatccatgccgaccagctgacccccacctggagggtgtacagcacaggcagcaacgtgttccagaccagggccggctgtctgatcggcgccgagtacgtgaacaactcttacgagtgcgacatccctatcggcgccggcatctgcgcctcctaccagacccagaccaagagccacagaagggccaggtccgtggcctcccagagcatcatcgcctacaccatgtccctgggcgccgaaaacagcgtggcctacagcaacaacagcatcgcaatccccaccaacttcaccatcagcgtgaccaccgagatcctgcccgtgagcatgaccaagacctccgtggactgcacaatgtacatctgcggcgacagcactgagtgcagcaacctgctgctgcagtatggcagcttctgcacccagctgaaaagggccctgaccggcattgccgtggagcaggacaagaacacccaggaggtgttcgcccaggtcaagcagatctacaagaccccccccatcaagtactttggcggcttcaactttagccagatcctgcccgaccccagcaagcccagcaagaggtccttcatcgaggatctgctgttcaacaaggtgacactggccgacgccggattcatcaagcagtacggcgactgcctgggcgacatcgccgccagggacctgatctgcgcccagaagtttaacggcctgaccgtgctgcctccactgctgaccgatgagatgatcgcccagtacaccagcgccctgctggccggcaccatcacctctgggtggaccttcggcgccggcgccgccctgcagatccctttcgccatgcagatggcctacagattcaatggcatcggagtgacccagaacgtgctgtacgagaatcagaagctgatcgccaaccagtttaactccgccatcggcaagatccaggacagcctgagcagcaccgccagcgccctgggcaagctgcaggatgtggtgaaccacaacgcccaggccctgaacaccctggtgaagcagctgtccagcaagtttggcgccatctcctccgtgctgaacgacatcctgagccggctggacccccccgaggccgaggtgcagatcgaccgcctgatcactggccggctgcagtctctgcagacctacgtgacccagcagctgatcagagccgccgagatcagagccagcgccaacctggccgccaccaagatgagcgagtgtgtgctgggccagagcaagcgcgtggacttctgtggcaaggggtaccatctgatgagcttcccccagagtgcccctcacggcgtggtgttcctgcacgtgacctacgtgcccgctcaggaaaagaacttcacaaccgcccccgccatctgccacgacggcaaggcccacttccctcgcgagggcgtgttcgtgagcaacggcactcactggttcgtgacccagcggaacttttacgagccccagatcatcaccaccgacaatacctttgtgagcggcaactgcgacgtggtgatcggcatcgtgaataatacagtgtacgaccccctgcagcctgagctggacagcttcaaggaggagctggacaagtactttaagaaccacaccagccctgatgtggatctgggcgacatctccggcatcaacgccagcgtggtgaacatccagaaggagatcgataggctgaatgaggtggccaagaacctgaacgagtccctgatcgacctgcaggagctggggaagtacgagcagtacatcaagtggccatggtacatctggctgggcttcattgctggcctgatcgccatcgtgatggtgaccatcatgctgtgctgcatgaccagctgctgcagctgcctgaagggctgctgctcttgcggctcttgctgcaagttcgacgaggacgacagcgagcccgtgctgaagggcgtgaagctgcactacacctaataa

SEQ ID NO: 575 - DNA, 1830 bp, synthetic construct
  source 1..1830: mol_type = other DNA
atggactctaaggggtccagccagaaaggctcccgcctgctgctgctgctggtggtgtctaatctcctgctgccccagggggtggtcggccagaacatgactaacatttgcccatttgaccaggtgtttaacaaaactcagtttccctccgtgtacgcctgggaaagggtgagaatctctgattgtgtcagcgactatacagtgctgtataacagctccgccagcttctccacttttaagtgttacggagtgtcccccaccaagctgaacgacctgtgctttagcggagtgtatgccgactattttgtggtgaagggcgaccacgtgcatcagatcgctcccggacagaccggagtcatcgccgactataattataaactgccttcagagttcgtgggatgcatcctggcctggaatactagaacaattgacagtaaaaggggattttactatagactgttccgccacgggaatattagaccctatgagagggacacatccaatgtcccttacaacgctgcaggcggcacctgcaaccagcccggaactcataactgctatgaacctctgcaggattatggctttacttccacctccggcgtggggtatcagcccttccgggtggtggtgctgagctttgagaacaagtctgccccagccaccgtctgcggaggcggctccggcgggtctgggaatatcacaaacctgtgccctttcggagaggtgttcaatgcaaccagatttgctagcgtgtacgcttggaacaggaagcggatctccaactgcgtggctgactacagcgtgctgtataactccgctagctttagcaccttcaagtgttatggagtgtcccctacaaagctgaatgatctctgctttaccaacgtgtacgcagattccttcgtgattaggggagatgaggtgaggcagattgcccccggacagacaggaaaaatcgccgactacaactataagctgccagacgattttacaggctgtgtgattgcctggaacagcaacaatctggacagcaaggtgggaggaaattacaactacctgagacgcctcttcagaaagtctaatctgaagccctttgagagagacatctccaccgaaatctaccaggcagggagcaccccatgcaatggcgtcgagggcttcaactgctactttccactgcagagctacggctttcagcccacaaacggggtgggctatcagccctatagggtggtggtgctgtcttttgaaaacaagtccgcacctgccacagtgtgcggcggcggctctggagggagtggggagtctcaggtgcgccagcagttttccaaggatatcgagaagctcctgaacgagcaggtgaacaaggaaatgcagagctccaacctgtatatgagcatgtcctcctggtgctacactcatagcctggatggcgccgggctgttcctgtttgatcacgccgccgaggaatacgagcacgccaagaagctgattatcttcctgaacgaaaacaacgtccctgtgcaactgacatccatttctgctcccgaacacaagttcgagggcctgacccagatctttcagaaagcatatgaacacgagcagcatatctctgagtccatcaacaacatcgtggaccatgcaatcaagagcaaggatcatgctactttcaatttcctgcagtggtatgtggccgagcagcacgaagaggaggtgctgtttaaggacatcctggataagatcgagctgattggcaacgaaaatcacggcctgtatcttgcagaccagtacgtgaagggaattgccaagagccgcaagagcggcagctaa

SEQ ID NO: 576 - DNA, 1830 bp, synthetic construct
  source 1..1830: mol_type = other DNA
atggatagcaagggaagctcccagaagggaagcagactgctgctgctgctggtggtgagcaacctgctgctgccccagggcgtggtgggccaaaatatcacaaacctgtgccctttcggcgaggtgttcaatgccaccaggttcgcctctgtgtacgcctggaatcggaagagaatcagcaattgtgtggccgactactccgtgctgtacaatagcgccagcttcagcaccttcaagtgctacggggtgagccccacaaagctgaatgacctgtgcttcaccaatgtgtacgccgacagcttcgtgatcagaggcgacgaggtgagacagatcgcccccggccagacaggcaagattgccgactacaattacaaactgcccgatgacttcacaggctgcgtgatcgcctggaatagcaacaatctggacagcaaagtgggcggcaattacaactacctgcggagactgtttcggaagtccaacctgaagccctttgagcgggacatcagcaccgagatctaccaggccggcagcaccccttgcaatggcgtggagggcttcaactgctatttccctctgcagagctacggcttccagcccaccaatggcgtgggctaccagccttacagagtggtggtgctgagcttcgagaataagagcgctcccgccacagtgtgtgggggcggctccggcggcagcggcaatatgacaaatatctgccccttcgatcaggtgttcaacaagacccagttcccctccgtgtacgcctgggagcgcgtgagaatctccgattgcgtgagcgactacaccgtgctgtacaatagctccgcctctttctctacattcaagtgttacggcgtgagccctacaaagctgaacgacctgtgcttcagcggcgtgtacgccgactacttcgtggtgaagggcgaccacgtgcaccagatcgcccctggccagaccggagtgatcgccgattacaactacaagctgcccagcgaattcgtgggctgtatcctggcctggaataccagaaccatcgacagcaagagaggcttctattacagactgttcagacacggcaacatccggccctacgaacgggacacctccaatgtgccttacaatgccgccggcggcacctgcaatcagcccggaacccacaactgctacgaacctctgcaggactacggcttcacctctaccagcggcgtgggataccagcccttccgggtggtggtgctgtcctttgagaataagtccgcccctgccaccgtgtgtggcggaggcagcggcggcagcggagagagccaggtgagacagcagttctctaaggacatcgagaagctgctgaatgagcaggtgaataaggagatgcagagcagcaacctgtacatgagcatgagcagctggtgttacacccactccctggacggcgccggcctgttcctgttcgatcatgccgccgaggagtacgagcacgctaagaagctgatcatcttcctgaatgaaaataatgtgccagtgcagctgaccagcatcagcgctccagagcacaagttcgagggcctgacccagatcttccagaaggcctacgaacacgagcagcacatcagcgagagcatcaacaatatcgtggaccacgctatcaagtccaaggaccacgccaccttcaatttcctgcagtggtacgtggccgaacagcatgaggaggaagtgctgttcaaggatatcctggacaagatcgagctgatcggcaatgagaatcacggcctgtacctggccgaccagtacgtgaagggcattgccaagtccagaaagagcggctcctaa

SEQ ID NO: 577 - DNA, 1836 bp, synthetic construct
  source 1..1836: mol_type = other DNA
atggactccaaggggagctcccagaaagggagcaggctgctgctgctcctggtggtgagcaacctgctgctgccacagggagtagtcggacagaatatcaccaacctgtgccctttcggggaggtgtttaatgccaccaagtttccttctgtgtacgcttgggaaaggaagaaaatctctaactgtgtcgctgattattccgtgctgtataattctacctttttctccacttttaagtgctatggggtgtccgctaccaaactcaacgacctgtgctttagcaacgtgtacgctgatagctttgtggtgaaaggagacgacgtgagacaaatcgcccccggccagactggggtgattgcagattacaattataaactgccagatgattttatggggtgtgtcctggcttggaacacacgcaacattgacgccactagcaccggaaattacaactacaaacggcggtatctgagacacggcaagctgcgcccttttgagagggacattagcaacgtgcctttcagcccagacggaaagccttgcacaccccctgcactgaattgctactggcccctgaacgactacggcttctataccaccactgggattgggtatcagccataccgggtcgtggtgctgtcatttgagaataagtccgcacccgccactgtgtgcggcggaggatctggaggctccggaaacatcactaatctctgccccttcggagaggtgtttaacgccacaagatttgcttccgtgtacgcttggaacaggaagagaatctccaattgcgtggccgactattctgtcctgtacaacagcgcctctttctccaccttcaagtgctatggggtttctcctacaaagctgaacgacctgtgtttcacaaatgtttacgccgattcctttgtgatccgcggcgatgaagtgagacagatcgctcctgggcagactggcaagattgccgattataactacaagctgcctgatgacttcaccggatgtgtgatcgcttggaattccaataacctcgactctaaggtgggaggcaattacaactatctgcggagactgttcaggaaatctaatctgaagccctttgagcgcgatatctccaccgagatctaccaggccggatctaccccttgtaatggagtggaagggtttaattgttacttccctctgcagtcctatggatttcagcctacaaacggcgtgggctaccagccttaccgggtcgtggtgctcagcttcgagaacaagagcgctccagctaccgtttgcggaggggggtccggcggatccggagaatctcaggtgcgccagcagttctccaaggatatcgagaagctgctgaacgagcaggtcaacaaagagatgcagagctccaatctctacatgagcatgtctagctggtgttacacacattccctggacggcgcaggcctgtttctcttcgaccacgctgccgaggagtacgagcatgcaaaaaaactcatcatctttctgaatgagaacaacgtgcccgtgcagctgacctctatcagcgcaccagagcataagtttgaagggctgacacagattttccagaaagcctacgagcacgagcagcacatttctgagtctatcaacaacattgtggatcacgctatcaaatccaaggatcacgcaacatttaattttctgcagtggtatgttgccgagcagcacgaggaggaggtgctgttcaaagatatcctggacaaaattgagctgatcggcaatgaaaatcacgggctgtacctggcagatcagtatgtgaaaggcattgctaagagcagaaagtctggaagctaa

SEQ ID NO: 578 - DNA, 1836 bp, synthetic construct
  source 1..1836: mol_type = other DNA
atggattctaagggatcctcccagaaagggtctaggctgctgctgcttctggttgtttccaacctgctgctgcctcagggcgtggtgggccagaatatcaccaacctgtgtccattcggcgaggtgttcaatgcaacccggtttgctagtgtgtatgcttggaatcgcaaacggatctccaactgcgtggctgactatagtgtgctctataactccgcctccttctccacctttaaatgctacggcgtctctccaaccaaactgaacgacctgtgttttaccaacgtgtatgcagactcttttgtgatccgcggggatgaggtgagacagatcgcacccggacagactggaaagattgccgattacaattataagctgcctgacgattttaccgggtgcgtgatcgcatggaactccaacaacctggactctaaggtgggcgggaattataactacctgcgccggctgttcaggaagtccaatctgaagccattcgaacgggatattagcaccgagatctatcaggccgggtccaccccatgcaacggcgtggaggggttcaactgctacttccctctccagagctatggcttccagcccacaaatggggtgggatatcaaccatacagagtggtggtcctgagctttgagaacaagagcgcaccagcaaccgtttgtggcggcggcagcggagggagcggcaacatcaccaacctgtgtccctttggagaagtgttcaacgctaccaaattcccaagcgtctacgcctgggagcggaagaagatctctaactgcgtggctgattattctgtgctgtacaactccaccttcttctccacatttaaatgttatggagtctccgctacaaagctgaacgacctgtgtttcagtaacgtgtacgcagactcatttgtggtcaagggagatgacgtccggcagattgccccaggccagacaggagtgatcgcagactacaattataagctgccagacgatttcatgggctgcgtgctggcttggaataccagaaacatcgatgccacctctactggcaattataactataagaggaggtatctgagacacggcaagctgaggccctttgagagagatatcagcaacgtcccattttctcctgacggaaagccatgcaccccacctgccctgaactgctattggcctctgaatgattatggattctacacaaccaccggaatcgggtaccagccctacagggtggtggtcctctccttcgaaaacaagagcgctcccgctacagtctgcggagggggaagcgggggatctggagagtcccaggtgcgccagcagtttagcaaggacatcgagaagctgctgaacgagcaagtgaataaagaaatgcagtccagcaacctctatatgtccatgtcctcctggtgctacacccatagcctggatggagctgggctgttcctgttcgaccacgccgccgaggagtatgaacatgccaaaaaactgattatttttctgaacgaaaataacgttcctgtgcagctgacctctatctctgcccctgaacacaagttcgaaggcctgacccagatctttcagaaggcatacgaacatgagcagcacatctccgagtccattaataacattgtggatcacgccattaagtccaaagaccatgccaccttcaatttcctgcagtggtacgttgccgagcagcacgaagaagaggtgctgtttaaggacatcctggacaaaattgagctgattggaaatgagaaccacggactgtacctcgctgaccagtacgtgaaggggatcgcaaagtctcgcaagtctggatcctaa

SEQ ID NO: 579 - DNA, 5208 bp, synthetic construct
  source 1..5208: mol_type = other DNA
atggatagcaagggaagctctcagaaagggtccagactgctgctgctgctggtcgtttccaacctgctgctcccacagggcgtcgtgggccaaaacatcactaacctgtgccctttcggcgaggtgttcaacgccacaaggttcgcaagcgtgtacgcttggaatagaaagcgcatctccaactgcgtcgcagattactctgtgctgtacaatagcgccagcttctccacattcaagtgttacggagtgtccccaaccaagctgaacgacctgtgcttcacaaatgtgtacgcagacagctttgtgatccggggagatgaggtgagacagatcgcccccggacagactggaaaaatcgctgactacaactacaaactgcccgatgatttcacaggatgcgttatcgcctggaacagcaacaacctggattccaaggttgggggcaactacaactacctgcgcaggctgttcaggaaaagcaacctgaaacctttcgaacgcgacatctctacagaaatctaccaggccggatccaccccatgtaacggagtggaaggctttaactgctacttccccctgcagtcttacggattccagcctactaatggcgtgggctatcagccttacagagttgtggtgctgtccttcgagaataagtctgcccctgccactgtgtgtgggggagggagcggcggatctgggaatattactaacttctgcccattcgataaggtcttcaacgccacacggtttcctaatgtctacgcctggcagaggaccaagatttctgactgtatcgctgactatactgtgctgtacaactctactagcttcagcacttttaaatgctacggcgtgtccccaagcaagctgattgacctgtgctttacatccgtctacgccgacacatttctgatccggttcagcgaggtcagacagatcgctcccggcgagacaggcgttatcgctgactacaattacaaactgcctgacgacttcacaggatgtgtgctggcttggaatacagcccagcaggatatcggcagctatttctacagatcccacagggcagtgaaactgaagccttttgagagagatctcagctccgacgaaaacggggtgcggacactgtctacctatgacttcaatcctaacgtgcctctggactatcaggccacaagagtggtggtcctgtccttcgagaacaaatccgccccagctaccgtttgcggcggcggatccgggggctccggatctagccagtgcgtgaacctcacaacacggactcagctgccccccgcctacactaacagcttcacacggggcgtctactatccagacaaagtgttccggagcagcgtgctgcacagcactcaggacctcttcctgccatttttctctaacgtgacatggtttcacgcaattcacgtgtctggcactaatgggactaagcggtttgataaccccgtcctgcctttcaacgacggcgtgtatttcgcctccactgaaaaaagcaatatcattagaggatggattttcggcacaactctggattccaaaacccagtccctgctcatcgtgaataatgccactaatgtggtgatcaaggtttgtgagttccagttctgcaatgacccttttctgggggtgtactatcacaaaaacaacaagtcctggatggagagcgagtttagggtttacagcagcgccaacaattgcactttcgaatacgtgtctcagcccttcctcatggacctggagggcaaacagggcaactttaaaaatctgcgcgagttcgtgttcaagaacatcgacggctacttcaaaatttacagcaagcacacacctatcaacctggtgagggacctgccccaggggttctctgccctggagccactggtcgacctgccaattggcatcaacatcacacgcttccagacactgctggccctgcatcggagctacctcacccctggagatagctctagcgggtggactgcaggagcagcagcctattacgtgggctatctgcagcccaggacatttctcctgaagtataacgagaacggaactatcaccgacgcagtggactgcgcactggatccactgtccgaaacaaagtgcaccctgaagtctttcaccgtggagaaaggaatttaccagacctccaattttcgcgttcagcccactgagtctattgtcaggtttcccaatattaccaacctgtgccccttcggcgaggtgtttaacgccactaaattccccagcgtgtacgcatgggaaaggaaaaagatctccaactgcgtcgccgattacagtgtgctgtacaatagcaccttcttcagcactttcaagtgctatggcgtcagcgccaccaagctgaatgacctctgcttcagcaatgtgtacgccgactcctttgtggtgaagggagatgacgtgcggcagatcgcccctggccagaccggagtgatcgccgattataattataaactgcctgacgattttatgggctgcgtgctggcatggaatacacggaacatcgacgcaacttccacagggaactataactataagtacaggtatctcagacacggaaagctgcgcccattcgagagagatatctctaacgtccctttttccccagacggcaaaccttgcaccccacccgctctgaattgctactggccactgaacgactatggcttctacacaactaccggcattggataccagccataccgcgtggtggtgctgtcttttgagctcctgaatgctcccgccacagtgtgcggcccaaagaagtctactaacctcgtgaaaaacaagtgtgtgaacttcaacttcaatggcctgaccggaactggggtgctgacagagagcaacaagaaatttctgccatttcagcagttcggcagagacatcgcagacactaccgatgccgtgcgcgacccccagactctggaaatcctcgacatcaccccttgcagcttcggcggcgtttctgtgatcacccccggaacgaatacaagcaaccaggtggccgtgctgtatcaggacgtgaactgcacagaggtgcccgtggcaattcatgccgaccagctcactcccacctggagggtctactctaccggcagcaacgtgttccagaccagggccgggtgtctgatcggagctgagcatgtgaataacagttacgagtgtgacatccccatcggggccggaatttgcgctagctatcagacccagacaaactctccaggaagcgcatcctccgtggcctctcagagcattattgcctacaccatgtcactgggagctgaaaacagtgtcgcttactccaataactccatcgccatcccaactaatttcacaattagcgtgaccaccgaaattctgccagtgagcatgacaaagacatcagtggattgtaccatgtatatttgcggcgactccaccgaatgcagcaatctcctgctgcagtacggctccttctgcactcagctgaacagggccctgactggcattgctgtcgagcaggacaaaaacacacaggaagtgttcgctcaggtcaagcagatttacaagactcccccaattaaagacttcggaggcttcaacttttcccagattctgccagacccctccaagccatccaaacgctctttcatcgaggacctgctgtttaacaaagtgacactggctgacgctgggttcattaagcagtatggtgactgcctcggggatatcgctgccagggacctgatttgtgctcagaaattcaacggactgaccgtgctgcctcctctgctgaccgacgaaatgatcgctcagtacaccagcgcactgctggcagggactatcacaagtggctggacattcggagccggagccgctctgcagatcccattcgccatgcagatggcatacagattcaacgggattggagtgactcagaacgtgctgtatgagaaccagaaactgatcgctaaccagttcaacagcgctattggaaaaattcaggattctctgtcttccactgcttccgccctggggaagctgcaggacgtggtgaaccagaacgctcaggctctcaatacactggtgaagcagctgtcctccaactttggggccatttcttctgtgctgaatgacatcctctccagactggatccaccagaggctgaggtgcagatcgatcggctgatcactggcaggctgcagagcctccagacatatgtgacccagcagctgattagagctgccgaaatcagggcatccgctaatctggcagctactaagatgtctgagtgtgtgctgggccagtccaagcgggtggacttttgtggaaagggctatcacctgatgtctttccctcagtccgccccacacggggtggtgttcctgcacgtcacctacgtccctgcccaggagaaaaattttaccaccgccccagccatttgccacgatggcaaagctcacttcccacgggaaggggtcttcgtgtccaatgggacacactggttcgtgacacagaggaatttttacgaaccacagatcatcaccaccgataacacctttgtgtctggaaattgcgatgtggtgattggaattgtgaataacactgtgtatgatcctctgcagtccgagctggattccattaaagaggagctggataagattcataagaacgggagcggcggcagcggcgatatcatcaaactgctcaacgagcaggtgaacaaggagatgcagagctcaaacctgtacatgagcatgtcttcttggtgctacacccacagcctcgatggagctggactgttcctgtttgatcacgccgccgaggagtacgaacacgcaaaaaagctgatcatcttcctgaatgagaataacgtccctgtgcagctgacatctatctctgcaccagagcataagtttgaaggactgacacagatttttcagaaggcatatgagcatgagcagcatatcagcgagtcaatcaacaacatcgtggaccacgcaatcaaaagcaaggaccatgctaccttcaacttcctgcagtggtacgtggcagagcagcacgaagaggaggtgctgttcaaggacattctggacaagattgaactgatcggcaacgaaaaccacggactgtacctggccgatcagtatgttaaggggatcgccaagtctaggaaaagcggatcttaa

SEQ ID NO: 580 - DNA, 5199 bp, synthetic construct
  source 1..5199: mol_type = other DNA
atggacagcaagggctcctctcagaagggatctcgcctgctgctcctgctcgttgtgagcaacctgctgctcccacagggggtggtcggccagaacattaccaacctgtgcccattcggcgaggtcttcaacgctacaaaattccccagcgtgtacgcatgggaaagaaaaaagattagcaattgtgtcgccgactactccgtgctgtacaatagcactttcttttccactttcaagtgctacggggtttccgctacaaagctgaatgacctgtgttttagcaatgtgtatgcagattcttttgtggtgaagggagacgatgtcagacagatcgccccaggccagacaggcgtcattgccgattacaattataaactgccagacgactttatgggatgcgtgctggcttggaacacccggaacatcgatgcaaccagtaccggcaactataattataagcgcaggtatctgaggcacggcaaactcagaccattcgagagagacatctctaacgtgcctttctctcccgatggtaaaccatgtaccccccctgccctgaattgttattggccactgaacgattatggattttatacaaccacaggcatcggctatcagccctatagagtggtggtgctgagcttcgagaacaaatccgccccagccactgtctgcggaggaggaagcggcggcagcggcaatatcacaaatttttgccccttcgacaaggtttttaacgccacacgcttccctaacgtgtacgcatggcagcggactaagattagcgactgtattgctgattacactgtcctctacaactctacctcattctccacctttaaatgctatggcgtcagcccttctaagctgatcgacctgtgcttcacaagcgtgtacgcagacaccttcctgatcaggttcagcgaggtcagacagattgctcccggggagactggcgtcattgccgattataactataagctgcctgatgatttcactgggtgcgtgctggcctggaacaccgcccagcaggacattggaagttacttttatagatctcacagggcagtcaagctgaagccattcgagagggacctgtctagcgacgaaaacggcgtgagaaccctgagcacttatgatttcaaccctaatgtgcctctggattaccaggcaacaagagtggtcgtgctgagcttcgaaaataagtccgccccagccactgtgtgcggcggggggtctggcggaagcggatcctcccagtgcgttaacctcactactcggacccagctgccccctgcttacactaactccttcacacggggcgtctattatcctgataaggtctttagaagcagcgttctgcactccactcaggaccttttcctgcccttcttcagcaatgtgacttggtttcacgcaatccacgtctccgggaccaacggcaccaagaggttcgacaatcccgtgctgccatttaacgacggagtttatttcgcttctaccgagaagtctaacattatcagaggctggatttttgggactaccctggactccaagacacagtctctgctgatcgtcaataacgccactaacgtggtcattaaggtgtgcgagttccaattttgcaatgacccctttctgggagtgtactatcacaagaacaataagagctggatggagtctgagttcagggtgtattcctctgccaacaattgcaccttcgagtatgtgtcacagccttttctcatggacctggagggcaagcaggggaacttcaaaaacctgcgcgaattcgtgttcaaaaacatcgatggatattttaaaatctactccaagcatacccccatcaacctggtcagggacctgccccagggcttttctgctctggaacctctggtggacctgcctattgggatcaacatcacaaggtttcagactctgctggcactgcaccgcagctatctgacccccggagatagcagctctgggtggaccgccggagctgctgcttattatgtcggatatctgcagccacggacatttctgctgaagtataacgagaacggaaccattactgatgctgtcgactgcgctctggaccctctgtctgaaaccaagtgcaccctgaagtctttcacagtggagaagggcatttatcagacatccaactttcgcgtgcagcccacagaaagcatcgtgagattccccaatatgactaatatttgtcctttcgaccaggtcttcaataagacccaattcccatccgtgtacgcctgggaacgcgtgagaattagcgactgtgttagcgactataccgtgctgtataattcttcagcctctttcagcacattcaagtgttacggcgtgagccctaccaagctgaacgacctgtgcttttctggagtgtacgctgactattttgtggtgaaaggggatcacgtgcaccagattgcacccgggcagacaggggtgattgcagattataattacaaactgccatctgagtttgtcggatgtatcctggcctggaacaccagaacaatcgactctaaaaggggcttttactatcggctgtttaggcatgggaatatcagaccatatgagagagatacaagcaacgttccctacaatgctgccgggggcacctgcaatcagccaggaacacacaactgctatgaacccctgcaggactatggattcaccagcactagcggcgtgggctaccagcctttccgcgttgtggttctcagcttcgaactgctgaacgccccagctaccgtttgtggacctaagaagtctaccaacctggtgaagaacaagtgtgtgaattttaacttcaacggactgactggaactggcgtcctgactgagtccaataagaagttcctgccctttcagcagttcgggagagacatcgccgatacaaccgatgccgtgagggatccacaaaccctggagatcctcgatattacaccttgcagcttcggcggggtgtcagtgattacacccggcactaatactagcaatcaggtggctgtcctgtaccaggatgtgaattgcactgaggttccagtggcaatccacgctgaccagctgacacctacctggagagtgtattctactggctccaacgtgtttcagacacgggccggctgcctgatcggagccgagcatgtcaacaactcatacgaatgtgacatccctattggggccgggatctgcgccagctaccagactcagacaaacagccctgggagcgcatcttccgtggctagccagtctattatcgcttacaccatgtccctgggagcagaaaacagcgtggcatattccaacaattctatcgcaattccaactaacttcacaatcagcgtgacaaccgaaatcctgcccgtgtccatgacaaagacaagcgtggattgcaccatgtatatctgcggagattccactgaatgctccaacctgctgctgcagtatggatccttctgcacacagctcaatagggccctcacaggcattgctgtggaacaagataagaacacccaggaggtcttcgcacaggtgaagcagatttataagacccccccaatcaaagactttggaggattcaacttttctcagattctgcccgacccatccaagcccagcaagcgttctttcatcgaggacctcctgtttaacaaggtcacactggccgacgctggcttcatcaaacagtacggggactgcctcggcgatattgccgcacgcgaccttatctgcgcccagaaatttaacggactgactgtcctgccaccactgctcaccgacgagatgattgcccagtatacaagcgctctgctggcagggactatcactagcggctggacattcggggccggcgctgccctgcagatccccttcgccatgcagatggcctatcgctttaacgggatcggcgtgactcagaatgtgctgtacgagaaccagaagctgatcgctaaccagttcaacagcgctattggaaaaatccaggattccctgagctctacagcttctgcactgggaaaactgcaagatgtggttaaccagaatgctcaggcattgaacacactggtcaagcagctgtcttctaactttggcgccatttccagcgtgctgaatgatatcctgagcagactggaccctccagaggcagaggtgcagatcgatcggctgatcacagggagactgcagtctctgcaaacttacgtgactcagcaactgattagagctgctgagattagagcctctgccaacctcgccgctaccaagatgagcgagtgtgtcctgggacagtctaagagagtggatttttgcgggaaggggtaccacctgatgagtttcccacagtccgcacctcacggagtggtgtttctgcacgtgacttacgtgcccgcccaggagaagaacttcacaacagcccctgccatttgccacgacgggaaggcccactttccaagagagggggtgttcgtgtccaacggaacacattggtttgtgactcagaggaacttctacgagcctcagatcatcacaactgataatacattcgtttccggcaattgcgatgtcgtcatcggcatcgttaacaataccgtgtatgaccctctgcagtctgaactcgacagtatcaaggaggaactggacaagatccacaagaacggcagcggcgggtctggcgacattattaagctgctgaatgagcaggttaataaggagatgcagtccagcaacctgtatatgtctatgtcctcctggtgctacactcatagcctggacggcgccggactgttcctcttcgaccatgccgcagaggaatacgagcacgccaagaaactgatcatcttcctgaacgaaaataatgtgcctgtgcagctgacttcgattagcgctcccgaacataagtttgaggggctgactcagatcttccagaaggcctacgagcacgagcagcacattagcgagtctattaacaacattgtcgaccatgccattaagagcaaagatcacgccactttcaatttcctgcaatggtatgtggcagaacagcatgaagaggaggtgctgttcaaggatatcctcgacaagattgagctgattggcaacgagaatcatggcctgtatctggctgatcagtatgtgaagggcatcgcaaagtcccggaagtcaggctcctaa

SEQ ID NO: 581 - DNA, 5199 bp, synthetic construct
  source 1..5199: mol_type = other DNA
atggattccaagggatcctctcagaaaggaagccggctgctgctgctgctggttgtctctaacctcctcctccctcagggcgtggtggggcagaatatgacaaacatctgccctttcgatcaggtgttcaacaaaactcagtttccatccgtgtatgcctgggaacgggtcaggatctctgattgtgtgagcgactacacagtgctgtacaatagctctgccagcttttctactttcaaatgttatggggtgtccccaacaaagctgaacgacctgtgttttagcggcgtctatgccgactactttgtggtgaaaggcgatcacgtgcaccagattgcccccgggcagacaggagttatcgccgactataactataagctgccttccgagttcgttggatgtattctcgcctggaacacacggaccatcgacagcaaaagagggttttactataggctgtttaggcatggaaatattaggccttacgagcgggatacctctaacgtgccttataacgccgctgggggaacctgcaaccagccaggcacacacaattgttacgagcctctgcaggactacgggttcacatctaccagcggcgtggggtatcagccttttagggtggtcgtcctgtcctttgagaataagagcgccccagccactgtttgtggggggggatccggagggagcggcaatatcaccaacttctgcccattcgataaggttttcaacgcaacccggtttccaaacgtctacgcctggcagagaaccaaaattagcgactgcatcgctgactacactgtgctgtataactccacatccttctccacatttaagtgctacggcgtgtccccatccaaactcatcgacctgtgcttcacatccgtgtacgctgacacatttctgatcaggtttagcgaggtcagacagatcgctccaggcgaaacaggggttatcgccgattataattataaactcccagatgacttcaccggatgtgtgctcgcctggaacaccgctcagcaggacattggcagctatttctacagatcccaccgggcagtcaagctgaaaccctttgaacgggacctgtccagcgatgaaaacggcgtgcgcaccctcagcacttatgattttaatccaaatgttcccctggattaccaggctacacgggtcgtggtgctgtcattcgaaaataagagcgcccctgcaaccgtgtgcggtggcggctccggcgggtccgggagctctcagtgcgtcaatctgactacacggactcaactgcctccagcatacactaacagcttcacacggggcgtctactatcctgacaaggtgttcaggagcagcgtcctgcactctacacaggacctctttctgcccttcttcagcaatgttacttggtttcacgccattcacgtgagcggaaccaatggcactaaaaggttcgacaatcctgtgctgcctttcaacgacggggtttactttgcctccactgagaagtccaatatcattcgggggtggatctttggaactaccctggactctaagactcagtctctgctgatcgtgaacaatgcaactaatgtggtgattaaggtctgcgaattccagttctgcaatgatccttttctgggcgtgtactatcacaagaataacaaaagctggatggagtccgaatttcgcgtttactcctctgcaaacaattgcactttcgagtacgtgagccagccatttctgatggacctcgagggaaagcagggaaacttcaagaatctgagggaatttgtgttcaagaacattgacggctattttaagatctactcaaaacatactccaattaacctcgtgagagatctgccacaggggttctctgcactggagcctctggtcgacctgcctattggaattaatatcacaagattccagactctgctggccctgcaccgctcctatctgacaccaggcgacagctccagcggctggaccgcaggcgccgccgcatattatgtgggctatttgcagcctagaacttttctcctgaagtacaacgagaatggcacaattacagatgccgtcgactgtgcactggacccactgtctgagactaagtgcacactgaaatccttcactgtggagaaagggatctaccagactagtaattttcgggtgcagccaacagagagcatcgtgcggttccctaacattactaacctgtgcccatttggggaagtgttcaatgcaacaaagttcccatccgtgtacgcctgggagagaaagaaaatttctaattgcgtggcagactactctgtgctctacaactctactttcttttccaccttcaagtgttatggcgttagcgccaccaaactgaacgacctgtgcttttctaacgtctatgccgatagctttgtggtcaagggcgatgacgtgaggcagatcgctcctggccaaacaggcgtgattgccgattataactacaagctgcctgacgacttcatgggatgcgtgctggcttggaatactagaaacattgacgcaaccagcactggaaattacaattacaagtacaggtatctgcgccacggcaagctgaggcccttcgaaagagatatttcaaacgtgcccttctctcctgacggaaagccatgtacccctccagccctgaactgctattggccactgaacgactatgggttttatactactacaggcattgggtatcagccttatagggtggttgtgctgtcctttgaactgctgaacgcaccggctaccgtgtgtggacccaaaaagtccacaaacctggtgaaaaataagtgcgtgaactttaacttcaacggactgacagggactggagtgctgaccgagtcaaacaaaaaattcctgccattccagcagttcgggagggacatcgctgacaccaccgacgctgtgagggatcctcagaccctggaaattctcgatattactccctgctcctttggaggagtctctgtcattacacctgggactaatactagcaatcaggtggccgtgctgtaccaggatgttaattgtactgaagtgcctgtggccatccacgcagatcagctgactcccacctggagagtgtacagtacaggctctaacgtgttccagaccagggctggctgtctgatcggggccgagcacgtgaataacagctatgagtgtgacattcccatcggggcaggaatctgcgcctcttaccagacacagaccaacagccctggctcagcatccagcgtcgccagccagtctatcatcgcctacacaatgtctctgggggcagagaatagcgtggcttattctaataattctattgctattcccacaaactttaccatcagcgtcacaaccgagatcctgccagtttccatgacaaagacctccgtcgattgtaccatgtacatctgcggcgactcaactgaatgttccaacctgctgctgcagtacggaagtttttgtacacagctgaatagggccctgacaggcatcgccgttgaacaggacaagaacactcaggaggtgttcgcccaggtcaagcagatctacaagacacctcctatcaaggatttcggaggattcaacttctcccagattctgcccgaccctagcaagcccagtaaaaggagcttcatcgaggacctgctattcaacaaggtcacactcgcagacgccgggttcattaaacaatacggcgattgcctcggcgacattgctgcacgcgacctgatttgtgcacagaagtttaacggcctgactgtcctgccccctctgctcaccgatgaaatgatcgcccagtacaccagcgctctgctggctgggactattacatccggatggacctttggcgcaggcgctgccctgcagatcccattcgccatgcagatggcctacagattcaatgggattggggtgacacagaatgtgctctatgagaatcagaaactgatagctaaccagttcaacagcgccattgggaagatccaggactctctgtcctctactgcttccgctctgggcaaactgcaggacgtcgtcaaccagaacgcccaagccctgaacaccctggtgaaacagctgtccagcaattttggcgccatttccagcgtcctcaacgacatcctgagcagattggatccacccgaggccgaggttcagatcgacagactgatcaccggccgactgcagagcctgcagacttacgtcactcagcagctgatccgggcagccgagatccgggccagcgcgaatctggcagctacaaagatgtccgagtgcgtgctgggccaatccaagagagtggacttctgcggaaagggctatcacctgatgagctttcctcagtctgcccctcacggcgtggttttcctgcatgtgacatacgtgccagcacaagagaagaacttcacaaccgctcctgctatctgccacgatgggaaagcacactttcctcgcgagggcgtgtttgtgtccaatgggacacactggtttgtgacccagagaaatttttatgagccacagatcattactaccgacaatacattcgtgtccggaaactgtgacgtggtgattgggattgtgaacaatactgtgtatgacccactccagagcgagctggattctatcaaagaagaactggacaaaatccataagaacggcagcggaggctccggagatattattaagctgctgaacgaacaggttaataaggagatgcagagcagcaacctgtatatgagtatgtcctcttggtgctacactcactccctggacggggccgggctgttcctgttcgaccacgccgccgaggagtatgagcatgctaagaagctgattatttttctgaacgaaaacaacgtgcctgtgcaactgacaagcatttccgcccctgagcataaatttgagggactcacacagattttccagaaagcctacgaacatgagcagcacatcagcgagtctatcaacaacattgtggaccacgctatcaagtccaaggaccacgccaccttcaacttcctgcagtggtatgtggctgagcagcacgaggaggaagtgctgtttaaggacatcctggacaagattgaactaattggaaacgaaaatcatgggctgtacctggctgaccagtatgttaaaggaatcgctaagtcccggaagtccgggtcctaa

SEQ ID NO: 582 - DNA, 4038 bp, synthetic construct
  source 1..4038: mol_type = other DNA
atggactccaagggctccagccagaagggcagccgcctgctgctgctgctggtggtgtcaaacctgctgctgccacagggggtggtgggcagcagccagtgcgtgaacctgatcaccagaacacagagctacaccaacagcttcaccagaggcgtgtactaccccgacaaggtgttcaggagctccgtgctgcacagcacccaggacctgttcctgcccttcttttccaacgtgacctggttccacgccatccacgtgtccggcaccaacggcaccaagcgcttcgacaaccccgccctgcccttcaacgacggagtgtacttcgcttctaccgagaagtccaacatcatcagaggctggatctttggaaccacactggacagcaagacccagagcctgctgatcgtgaataacgccaccaacgtcgtgatcaaggtgtgcgagtttcagttctgcaacgaccccttcctggatgtgtaccagaagaataacaagagctggatggagagcgagttcagggtgtacagctccgccaacaattgtaccttcgagtacgtgtcccagcctttcctgatggacctggagggcaaggagggcaacttcaaaaacctgagggagttcgtgttcaagaatatcgacggctacttcaagatctacagcaaacacaccccaattaacctggagagggacctgcctcagggcttctccgccctggagcccctggtggacctgcccatcggcatcaatatcaccagattccagacactgctggccctgcacagaagctacctgacccccgtggacagcagcagcggctggactgccggcgccgccgcttactacgtgggctacctgcagcccaggacctttctgctgaagtacaacgagaacggcaccatcaccgacgccgtggattgcgccctggaccccctgtccgagacaaagtgcaccctgaagtctttcaccgtggagaagggcatctaccagaccagcaacttcagagtgcagcccaccgagtccatcgtgcgcttccccaacatcaccaacctgtgccccttccacgaggtgttcaacgccacaacctttgcctccgtgtacgcctggaacaggaagagaatcagcaactgcgtggccgactacagcgtgatctacaatttcgcccccttcttcgccttcaagtgttacggcgtgagccccaccaagctgaatgacctgtgcttcacaaacgtgtacgccgacagcttcgtgatcagaggcaatgaggtgagccagatcgcccccggccagaccggcaacattgccgattataattacaagctgcccgacgactttaccggctgcgtgatcgcctggaatagcaacaagctggactctaagcccagcggcaactataattacctgtacagactgttcagaaagagcaagctgaagcctttcgagagagacatcagcacagagatctaccaggccggcaacaagccatgcaatggcgtggctggcccaaactgctacagccccctgcagtcctacggctttcggcctacctacggcgtgggccaccagccctacagagtggtggtgctgagcttcgagctgctgcacgcccccgccaccgtgtgcggccccaaaaagagcaccaacctggtgaagaacaagtgcgtgaacttcaatttcaacggcctgaccggcaccggcgtgctgaccgagtccaacaagaagttcctgccctttcagcagttcggccgggacatcgccgacaccaccgacgccgtgagggacccccagaccctggagatcctggacatcaccccatgttcctttggcggcgtgagcgtgatcacccctggcactaacaccagcaatcaggtggccgtgctgtaccagggggtgaactgcaccgaggtgcccgtggctatccatgccgaccagctgacccccacctggagggtgtacagcacaggcagcaacgtgttccagaccagggccggctgtctgatcggcgccgagtacgtgaacaactcttacgagtgcgacatccctatcggcgccggcatctgcgcctcctaccagacccagaccaagagcccaggatcagcctcatccgtggcctcccagagcatcatcgcctacaccatgtccctgggcgccgaaaacagcgtggcctacagcaacaacagcatcgcaatccccaccaacttcaccatcagcgtgaccaccgagatcctgcccgtgagcatgaccaagacctccgtggactgcacaatgtacatctgcggcgacagcactgagtgcagcaacctgctgctgcagtatggcagcttctgcacccagctgaaaagggccctgaccggcattgccgtggagcaggacaagaacacccaggaggtgttcgcccaggtcaagcagatctacaagaccccccccatcaagtactttggcggcttcaactttagccagatcctgcccgaccccagcaagcccagcaagaggtccttcatcgaggatctgctgttcaacaaggtgacactggccgacgccggattcatcaagcagtacggcgactgcctgggcgacatcgccgccagggacctgatctgcgcccagaagtttaacggcctgaccgtgctgcctccactgctgaccgatgagatgatcgcccagtacaccagcgccctgctggccggcaccatcacctctgggtggaccttcggcgccggcgccgccctgcagatccctttcgccatgcagatggcctacagattcaatggcatcggagtgacccagaacgtgctgtacgagaatcagaagctgatcgccaaccagtttaactccgccatcggcaagatccaggacagcctgagcagcaccgccagcgccctgggcaagctgcaggatgtggtgaaccacaacgcccaggccctgaacaccctggtgaagcagctgtccagcaagtttggcgccatctcctccgtgctgaacgacatcctgagccggctggacccccccgaggccgaggtgcagatcgaccgcctgatcactggccggctgcagtctctgcagacctacgtgacccagcagctgatcagagccgccgagatcagagccagcgccaacctggccgccaccaagatgagcgagtgtgtgctgggccagagcaagcgcgtggacttctgtggcaaggggtaccatctgatgagcttcccccagagtgcccctcacggcgtggtgttcctgcacgtgacctacgtgcccgctcaggaaaagaacttcacaaccgcccccgccatctgccacgacggcaaggcccacttccctcgcgagggcgtgttcgtgagcaacggcactcactggttcgtgacccagcggaacttttacgagccccagatcatcaccaccgacaatacctttgtgagcggcaactgcgacgtggtgatcggcatcgtgaataatacagtgtacgaccccctgcagtcagagctggacagcatcaaggaggagctggacaagatccacaagaacggctccggcggcagcggcgacatcatcaagctgctgaacgaacaggtgaataaggagatgcagagcagcaacctgtacatgagcatgtcctcctggtgctacacccatagcctggacggcgccggcctgttcctgttcgaccacgccgccgaggagtacgagcacgccaagaagctgatcatcttcctgaacgagaacaatgtgcctgtgcagctgacttccatcagcgcccccgagcacaagttcgagggcctgacccagatcttccagaaggcctacgagcatgagcagcacatcagcgagagcatcaacaacatcgtggatcacgccatcaagagcaaggatcacgccactttcaacttcctgcagtggtacgtggccgagcagcacgaggaggaggtgctgttcaaggacatcctggacaagatcgagctgatcggcaatgagaaccacggcctgtacctggccgaccagtacgtcaagggcatcgccaagagcagaaagagcggctcctaataa

SEQ ID NO: 583 - protein, 8 aa, synthetic construct
GGGSGGSG

SEQ ID NO: 584 - protein, 4 aa, unidentified
RRAS

SEQ ID NO: 585 - protein, 4 aa, unidentified
GSAS

SEQ ID NO: 586 - protein, 10 aa, synthetic construct
  VARIANT 1..10: note = This sequence may encompass 5-10 residues
HHHHHHHHHH

SEQ ID NO: 587 - RNA, 500 nt, synthetic construct
  source 1..500: mol_type = other RNA
  misc_difference 1..500: note = This sequence may encompass 10, 50, 75, 100, 150, 200, 250, 300, 350, 400, 450, or 500 nucleotides
aaaaaaaaaaaaaaaaaaaaaaaaaaaaaaaaaaaaaaaaaaaaaaaaaaaaaaaaaaaaaaaaaaaaaaaaaaaaaaaaaaaaaaaaaaaaaaaaaaaaaaaaaaaaaaaaaaaaaaaaaaaaaaaaaaaaaaaaaaaaaaaaaaaaaaaaaaaaaaaaaaaaaaaaaaaaaaaaaaaaaaaaaaaaaaaaaaaaaaaaaaaaaaaaaaaaaaaaaaaaaaaaaaaaaaaaaaaaaaaaaaaaaaaaaaaaaaaaaaaaaaaaaaaaaaaaaaaaaaaaaaaaaaaaaaaaaaaaaaaaaaaaaaaaaaaaaaaaaaaaaaaaaaaaaaaaaaaaaaaaaaaaaaaaaaaaaaaaaaaaaaaaaaaaaaaaaaaaaaaaaaaaaaaaaaaaaaaaaaaaaaaaaaaaaaaaaaaaaaaaaaaaaaaaaaaaaaaaaaaaaaaaaaaaaaaaaaaaaaaaaaaaaaaaaaaaaaaaaaaaaaaaaaaaaaaaaaaaaaaa

SEQ ID NO: 588 - RNA, 100 nt, synthetic construct
  source 1..100: mol_type = other RNA
aaaaaaaaaaaaaaaaaaaaaaaaaaaaaaaaaaaaaaaaaaaaaaaaaaaaaaaaaaaaaaaaaaaaaaaaaaaaaaaaaaaaaaaaaaaaaaaaaaaa